(19) United States
(12) Patent Application Publication
(10) Pub. No.: US 2024/0076678 A1
(43) Pub. Date: Mar. 7, 2024

(54) COMPOSITIONS AND METHODS FOR EPIGENETIC EDITING

(71) Applicant: Chroma Medicine, Inc., Boston, MA (US)

(72) Inventors: Morgan Maeder, Waban, MA (US); Ari Friedland, Cambridge, MA (US); Samantha Linder, Salem, MA (US); Vic Myer, Arlington, MA (US)

(21) Appl. No.: 18/338,049

(22) Filed: Jun. 20, 2023

Related U.S. Application Data
(63) Continuation of application No. PCT/US2021/064913, filed on Dec. 22, 2021.
(60) Provisional application No. 63/129,283, filed on Dec. 22, 2020.
(60) Provisional application No. 63/280,452, filed on Nov. 17, 2021.

(51) Int. Cl. C12N 15/113; C07K 14/47; C12N 9/22

(52) U.S. Cl. CPC C12N 15/1138; C07K 14/4702; C12N 9/22; A61K 38/00; C07K 2319/80; C12N 2310/20; C12N 2800/80

(57) ABSTRACT

Disclosed herein are compositions and methods comprising epigenetic editors for epigenetic editing or cells, nucleic acids, and vectors comprising the same. Also disclosed are epigenetically modified chromosomes.

### CROSS REFERENCE

[0001] This application is a continuation of International Application No. PCT/US2021/064913, filed on Dec. 22, 2021, which claims the benefit of U.S. Provisional Application No. 63/129,283, filed Dec. 22, 2020, and U.S. Provisional Application No. 63/280,452, filed Nov. 17, 2021, which are each incorporated herein by reference in its entirety.

### SEQUENCE LISTING

[0002] The instant application contains a Sequence Listing which has been submitted electronically in XML format and is hereby incorporated by reference in its entirety. Said XML copy, created on Jul. 14, 2023, is named 59073_708_301_SL.xml and is 1,748,707 bytes in size.

### BACKGROUND

[0003] Genome editing has been considered a promising therapeutic approach for treatment of genetic disease for over a decade. However, manipulation on the DNA level remains risky given the potential for undesired double stranded breaks, heterogenous repair including large and small insertions and deletions at the intended site, and toxicity.

### SUMMARY

[0004] Provided herein are compositions for epigenetic modification related to epigenetic editors and methods of using the same to generate epigenetic modification in target genomes, including those in host cells and organisms, without introducing changes to genomic sequences.

[0005] Described herein is an epigenetic editor comprising a fusion protein, wherein the fusion protein comprises (a) a first DNMT domain; (b) a DNA binding domain; (c) a first repressor domain; and (d) a second repressor domain. In some embodiments, the DNA binding domain binds to a target sequence in a target chromosome comprising a target gene. In some embodiments, the repressor domain specifically binds to an epigenetic effector protein in a cell comprising a target gene and directs the epigenetic editor to the target gene to effect an epigenetic modification in a nucleotide in the target gene or a histone bound to the target gene.

[0006] In some embodiments, the fusion protein further comprises a second DNMT domain. In some embodiments, the first DNMT domain is selected from the group consisting of a DNMT3A domain, a DNMT3B domain, a DNMT3C domain, and a DNMT3L domain. In some embodiments, the first DNMT domain is the DNMT3A domain. In some embodiments, the first DNMT domain is the DNMT3L domain. In some embodiments, the first DNMT domain is a human DNMT domain. In some embodiments, the human DNMT domain is a human DNMT3A domain. In some embodiments, the human DNMT domain is a human DNMT3L domain. In some embodiments, wherein the first DNMT domain is a mouse DNMT domain. In some embodiments, the mouse DNMT domain is a mouse DNMT3A domain. In some embodiments, the mouse DNMT domain is a mouse DNMT3L domain. In some embodiments, the first DNMT domain is a DNMT3A domain and the second DNMT domain is a DNMT3L domain. In some embodiments, the first DNMT domain is a human DNMT3A domain and the second DNMT domain is a human DNMT3L domain. In some embodiments, the first DNMT domain is a human DNMT3A domain and the second DNMT domain is a mouse DNMT3L domain. In some embodiments, the first DNMT domain is a mouse DNMT3A domain and the second DNMT domain is a human DNMT3L domain. In some embodiments, is a mouse DNMT3A domain and the second DNMT domain is a mouse DNMT3L domain.

[0007] In some embodiments, the first DNMT domain is a catalytic portion of a DNMT domain. In some embodiments, the second DNMT domain is a catalytic portion of a DNMT domain. In some embodiments, the first DNMT domain and the second DNMT domain are selected from the group consisting of SEQ ID NO: 32-66.

[0008] In some embodiments, at least one of the repressor domains is selected from the group consisting of: ZIM3, ZNF436, ZNF257, ZNF675, ZNF490, ZNF320, ZNF331, ZNF816, ZNF680, ZNF41, ZNF189, ZNF528, ZNF543, ZNF554, ZNF140, ZNF610, ZNF264, ZNF350, ZNF8, ZNF582, ZNF30, ZNF324, ZNF98, ZNF669, ZNF677, ZNF596, ZNF214, ZNF37A, ZNF34, ZNF250, ZNF547, ZNF273, ZNF354A, ZFP82, ZNF224, ZNF33A, ZNF45, ZNF175, ZNF595, ZNF184, ZNF419, ZFP28-1, ZFP28-2, ZNF18, ZNF213, ZNF394, ZFP1, ZFP14, ZNF416, ZNF557, ZNF566, ZNF729, ZIM2, ZNF254, ZNF764, ZNF785, ZNF10, CBX5, RYBP, YAF2, MGA, CBX1, SCMH1, MPP8, SUMO3, HERC2, BIN1, PCGF2, TOX, FOXA1, FOXA2, IRF2BP1, IRF2BP2, IRF2BPL IRF-2BP1_2 N-terminal domain, HOXA13, HOXB13, HOXC13, HOXA11, HOXC11, HOXC10, HOXA10, HOXB9, HOXA9, ZFP28, ZN334, ZN568, ZN37A, ZN181, ZN510, ZN862, ZN140, ZN208, ZN248, ZN571, ZN699, ZN726, ZIK1, ZNF2, Z705F, ZNF14, ZN471, ZN624, ZNF84, ZNF7, ZN891, ZN337, Z705G, ZN529, ZN729, ZN419, Z705A, ZNF45, ZN302, ZN486, ZN621, ZN688, ZN33A, ZN554, ZN878, ZN772, ZN224, ZN184, ZN544, ZNF57, ZN283, ZN549, ZN211, ZN615, ZN253, ZN226, ZN730, Z585A, ZN732, ZN681, ZN667, ZN649, ZN470, ZN484, ZN431, ZN382, ZN254, ZN124, ZN607, ZN317, ZN620, ZN141, ZN584, ZN540, ZN75D, ZN555, ZN658, ZN684, RBAK, ZN829, ZN582, ZN112, ZN716, HKR1, ZN350, ZN480, ZN416, ZNF92, ZN100, ZN736, ZNF74, CBX1, ZN443, ZN195, ZN530, ZN782, ZN791, ZN331, Z354C, ZN157, ZN727, ZN550, ZN793, ZN235, ZNF8, ZN724, ZN573, ZN577, ZN789, ZN718, ZN300, ZN383, ZN429, ZN677, ZN850, ZN454, ZN257, ZN264, ZFP82, ZFP14, ZN485, ZN737, ZNF44, ZN596, ZN565, ZN543, ZFP69, SUMO1, ZNF12, ZN169, ZN433, SUMO3, ZNF98, ZN175, ZN347, ZNF25, ZN519, Z585B, ZIM3, ZN517, ZN846, ZN230, ZNF66, ZFP1, ZN713, ZN816, ZN426, ZN674, ZN627, ZNF20, Z587B, ZN316, ZN233, ZN611, ZN556, ZN234, ZN560, ZNF77, ZN682, ZN614, ZN785, ZN445, ZFP30, ZN225, ZN551, ZN610, ZN528, ZN284, ZN418, MPP8, ZN490, ZN805, Z780B, ZN763, ZN285, ZNF85, ZN223, ZNF90, ZN557, ZN425, ZN229, ZN606, ZN155, ZN222, ZN442, ZNF91, ZN135, ZN778, RYBP, ZN534, ZN586, ZN567, ZN440, ZN583, ZN441, ZNF43, CBX5, ZN589, ZNF10, ZN563, ZN561, ZN136, ZN630, ZN527, ZN333, Z324B, ZN786, ZN709, ZN792, ZN599, ZN613, ZF69B, ZN799, ZN569, ZN564, ZN546, ZFP92, YAF2, ZN723, ZNF34, ZN439, ZFP57, ZNF19, ZN404, ZN274, CBX3, ZNF30, ZN250, ZN570, ZN675, ZN695, ZN548, ZN132, ZN738, ZN420, ZN626, ZN559, ZN460, ZN268, ZN304, ZIM2, ZN605, ZN844, SUMO5, ZN101, ZN783, ZN417, ZN182, ZN823, ZN177, ZN197, ZN717, ZN669, ZN256, ZN251, CBX4, PCGF2, CDY2, CDYL2, HERC2, ZN562, ZN461, Z324A, ZN766, ID2, TOX, ZN274, SCMH1, ZN214, CBX7, ID1, CREM, SCX, ASCL1, ZN764, SCML2, TWST1, CREB1, TERF1, ID3, CBX8, CBX4, GSX1, NKX22, ATF1, TWST2, ZNF17, TOX3, TOX4, ZMYM3, I2BP1, RHXF1, SSX2, I2BPL, ZN680, CBX1, TR168, HXA13, PHC3, TCF24, CBX3, HXB13, HEY1, PHC2, ZNF81, FIGLA, SAM11, KMT2B, HEY2, JDP2, HXC13, ASCL4, HHEX, HERC2, GSX2, BIN1, ETV7, ASCL3, PHC1, OTP, I2BP2, VGLL2, HXA11, PDLI4, ASCL2, CDX4, ZN860, LMBL4, PDIP3, NKX25, CEBPB, ISL1, CDX2, PROP1, SIN3B, SMBT1, HXC11, HXC10, PRS6A, VSX1, NKX23, MTG16, HMX3, HMX1, KIF22, CSTF2, CEBPE, DLX2, ZMYM3, PPARG, PRIC1, UNC4, BARX2, ALX3, TCF15, TERA, VSX2, HXD12, CDX1, TCF23, ALX1, HXA10, RX, CXXC5, SCML1, NFIL3, DLX6, MTG8, CBX8, CEBPD, SEC13, FIP1, ALX4, LHX3, PRIC2, MAGI3, NELL1, PRRX1, MTG8R, RAX2, DLX3, DLX1, NKX26, NAB1, SAMD7, PITX3, WDR5, MEOX2, NAB2, DHX8, FOXA2, CBX6, EMX2, CPSF6, HXC12, KDM4B, LMBL3, PHX2A, EMX1, NC2B, DLX4, SRY, ZN777, NELL1, ZN398, GATA3, BSH, SF3B4, TEAD1, TEAD3, RGAP1, PHF1, FOXA1, GATA2, FOXO3, ZN212, IRX4, ZBED6, LHX4, SIN3A, RBBP7, NKX61, TRI68, R51A1, MB3L1, DLX5, NOTC1, TERF2, ZN282, RGS12, ZN840, SPI2B, PAX7, NKX62, ASXL2, FOXO1, GATA3, GATA1, ZMYM5, ZN783, SPI2B, LRP1, MIXL1, SGT1, LMCD1, CEBPA, GATA2, SOX14, WTIP, PRP19, CBX6, NKX11, RBBP4, DMRT2, SMCA2, and fragments thereof. In some embodiments, at least one of the repressor domains is selected from the group consisting of: SEQ ID NO: 67-595. In some embodiments, at least one of the repressor domains is selected from the group consisting of: ZIM3, ZNF264, ZN577, ZN793, ZFP28, ZN627, RYBP, TOX, TOX3, TOX4, I2BP1, SCMH1, SCML2, CDYL2, CBX8, CBX5, and CBX1, and fragments thereof.

[0009] In some embodiments, one of the repressor domains is a KRAB domain. In some embodiments, the KRAB domain is a KOX1 KRAB domain.

[0010] In some embodiments, the DNA binding domain comprises a zinc finger motif. In some embodiments, the DNA binding domain comprises a zinc finger array. In some embodiments, the DNA binding domain comprises a nucleic acid guided DNA binding domain bound to a guide polynucleotide. In some embodiments, the DNA binding domain comprises CRISPR-Cas protein bound to the guide polynucleotide. In some embodiments, the guide polynucleotide hybridizes with a target sequence. In some embodiments, the CRISPR-Cas protein comprises a nuclease inactive Cas9 (dCas9). In some embodiments, the dCas9 is a dSpCas9. In some embodiments, the dSpCas9 is defined as SEQ ID NO: 3. In some embodiments, the CRISPR-Cas protein comprises a nuclease inactive Cas12a (dCas12a). In some embodiments, the CRISPR-Cas protein comprises a nuclease inactive CasX (dCasX).

[0011] In some embodiments, the fusion protein comprises from N-terminus to C-terminus: DNMT3A-DNMT3L-dSpCas9-KOX1KRAB—the second repressor domain. In some embodiments, a linker connects the domains of the fusion protein. In some embodiments, the linker is an XTEN linker. In some embodiments, the XTEN linker is selected from the group consisting of: XTEN-16, XTEN-18, and XTEN-80. In some embodiments, the fusion protein comprises from N-terminus to C-terminus: DNMT3A-DNMT3L-XTEN80-dSpCas9-XTEN16-KOX1KRAB-XTEN18—the second repressor domain.

[0012] Also described herein is an epigenetic editor comprising a fusion protein, wherein the fusion protein comprises (a) a first DNMT domain; (b) a DNA binding domain; and (c) a repressor domain, wherein the repressor domain is selected from the group consisting of: ZIM3, ZNF436, ZNF257, ZNF675, ZNF490, ZNF320, ZNF331, ZNF816, ZNF680, ZNF41, ZNF189, ZNF528, ZNF543, ZNF554, ZNF140, ZNF610, ZNF264, ZNF350, ZNF8, ZNF582, ZNF30, ZNF324, ZNF98, ZNF669, ZNF677, ZNF596, ZNF214, ZNF37A, ZNF34, ZNF250, ZNF547, ZNF273, ZNF354A, ZFP82, ZNF224, ZNF33A, ZNF45, ZNF175, ZNF595, ZNF184, ZNF419, ZFP28-1, ZFP28-2, ZNF18, ZNF213, ZNF394, ZFP1, ZFP14, ZNF416, ZNF557, ZNF566, ZNF729, ZIM2, ZNF254, ZNF764, ZNF785, ZNF10, CBX5, RYBP, YAF2, MGA, CBX1, SCMH1, MPP8, SUMO3, HERC2, BIN1, PCGF2, TOX, FOXA1, FOXA2, IRF2BP1, IRF2BP2, IRF2BPL IRF-2BP1_2 N-terminal domain, HOXA13, HOXB13, HOXC13, HOXA11, HOXC11, HOXC10, HOXA10, HOXB9, HOXA9, ZFP28, ZN334, ZN568, ZN37A, ZN181, ZN510, ZN862, ZN140, ZN208, ZN248, ZN571, ZN699, ZN726, ZIK1, ZNF2, Z705F, ZNF14, ZN471, ZN624, ZNF84, ZNF7, ZN891, ZN337, Z705G, ZN529, ZN729, ZN419, Z705A, ZNF45, ZN302, ZN486, ZN621, ZN688, ZN33A, ZN554, ZN878, ZN772, ZN224, ZN184, ZN544, ZNF57, ZN283, ZN549, ZN211, ZN615, ZN253, ZN226, ZN730, Z585A, ZN732, ZN681, ZN667, ZN649, ZN470, ZN484, ZN431, ZN382, ZN254, ZN124, ZN607, ZN317, ZN620, ZN141, ZN584, ZN540, ZN75D, ZN555, ZN658, ZN684, RBAK, ZN829, ZN582, ZN112, ZN716, HKR1, ZN350, ZN480, ZN416, ZNF92, ZN100, ZN736, ZNF74, CBX1, ZN443, ZN195, ZN530, ZN782, ZN791, ZN331, Z354C, ZN157, ZN727, ZN550, ZN793, ZN235, ZNF8, ZN724, ZN573, ZN577, ZN789, ZN718, ZN300, ZN383, ZN429, ZN677, ZN850, ZN454, ZN257, ZN264, ZFP82, ZFP14, ZN485, ZN737, ZNF44, ZN596, ZN565, ZN543, ZFP69, SUMO1, ZNF12, ZN169, ZN433, SUMO3, ZNF98, ZN175, ZN347, ZNF25, ZN519, Z585B, ZIM3, ZN517, ZN846, ZN230, ZNF66, ZFP1, ZN713, ZN816, ZN426, ZN674, ZN627, ZNF20, Z587B, ZN316, ZN233, ZN611, ZN556, ZN234, ZN560, ZNF77, ZN682, ZN614, ZN785, ZN445, ZFP30, ZN225, ZN551, ZN610, ZN528, ZN284, ZN418, MPP8, ZN490, ZN805, Z780B, ZN763, ZN285, ZNF85, ZN223, ZNF90, ZN557, ZN425, ZN229, ZN606, ZN155, ZN222, ZN442, ZNF91, ZN135, ZN778, RYBP, ZN534, ZN586, ZN567, ZN440, ZN583, ZN441, ZNF43, CBX5, ZN589, ZNF10, ZN563, ZN561, ZN136, ZN630, ZN527, ZN333, Z324B, ZN786, ZN709, ZN792, ZN599, ZN613, ZF69B, ZN799, ZN569, ZN564, ZN546, ZFP92, YAF2, ZN723, ZNF34, ZN439, ZFP57, ZNF19, ZN404, ZN274, CBX3, ZNF30, ZN250, ZN570, ZN675, ZN695, ZN548, ZN132, ZN738, ZN420, ZN626, ZN559, ZN460, ZN268, ZN304, ZIM2, ZN605, ZN844, SUMO5, ZN101, ZN783, ZN417, ZN182, ZN823, ZN177, ZN197, ZN717, ZN669, ZN256, ZN251, CBX4, PCGF2, CDY2, CDYL2, HERC2, ZN562, ZN461, Z324A, ZN766, ID2, TOX, ZN274, SCMH1, ZN214, CBX7, ID1, CREM, SCX, ASCL1, ZN764, SCML2, TWST1, CREB1, TERF1, ID3, CBX8, CBX4, GSX1, NKX22, ATF1, TWST2, ZNF17, TOX3, TOX4, ZMYM3, I2BP1, RHXF1, SSX2, I2BPL, ZN680, CBX1, TR168, HXA13, PHC3, TCF24, CBX3, HXB13, HEY1, PHC2, ZNF81, FIGLA, SAM11, KMT2B, HEY2, JDP2, HXC13, ASCL4, HHEX, HERC2, GSX2, BIN1, ETV7, ASCL3, PHC1, OTP, I2BP2, VGLL2, HXA11, PDLI4, ASCL2, CDX4, ZN860, LMBL4, PDIP3, NKX25, CEBPB, ISL1, CDX2, PROP1, SIN3B, SMBT1, HXC11, HXC10, PRS6A, VSX1, NKX23, MTG16, HMX3, HMX1, KIF22, CSTF2, CEBPE, DLX2, ZMYM3, PPARG, PRIC1, UNC4, BARX2, ALX3, TCF15, TERA, VSX2, HXD12, CDX1, TCF23, ALX1, HXA10, RX, CXXC5, SCML1, NFIL3, DLX6, MTG8, CBX8, CEBPD, SEC13, FIP1, ALX4, LHX3, PRIC2, MAGI3, NELL1, PRRX1, MTG8R, RAX2, DLX3, DLX1, NKX26, NAB1, SAMD7, PITX3, WDR5, MEOX2, NAB2, DHX8, FOXA2, CBX6, EMX2, CPSF6, HXC12, KDM4B, LMBL3, PHX2A, EMX1, NC2B, DLX4, SRY, ZN777, NELL1, ZN398, GATA3, BSH, SF3B4, TEAD1, TEAD3, RGAP1, PHF1, FOXA1, GATA2, FOXO3, ZN212, IRX4, ZBED6, LHX4, SIN3A, RBBP7, NKX61, TR168, R51A1, MB3L1, DLX5, NOTC1, TERF2, ZN282, RGS12, ZN840, SPI2B, PAX7, NKX62, ASXL2, FOXO1, GATA3, GATA1, ZMYM5, ZN783, SPI2B, LRP1, MIXL1, SGT1, LMCD1, CEBPA, GATA2, SOX14, WTIP, PRP19, CBX6, NKX11, RBBP4, DMRT2, SMCA2 and fragments thereof.

[0013] In some embodiments, at least one of the repressor domains is selected from the group consisting of: SEQ ID NO: 67-595. In some embodiments, the DNA binding domain binds to a target sequence in a target chromosome comprising a target gene. In some embodiments, the repressor domain specifically binds to an epigenetic effector protein in a cell comprising a target gene and directs the epigenetic editor to the target gene to effect an epigenetic modification in a nucleotide in the target gene or a histone bound to the target gene. In some embodiments, the repressor domains is selected from the group consisting of ZIM3, ZNF264, ZN577, ZN793, ZFP28, ZN627, RYBP, TOX, TOX3, TOX4, I2BP1, SCMH1, SCML2, CDYL2, CBX8, CBX5, and CBX1, and fragments thereof.

[0014] In some embodiments, the fusion protein further comprises a second DNMT domain. In some embodiments, the first DNMT domain is selected from the group consisting of a DNMT3A domain, a DNMT3B domain, a DNMT3C domain, and a DNMT3L domain. In some embodiments, the first DNMT domain is the DNMT3A domain. In some embodiments, the first DNMT domain is the DNMT3L domain. In some embodiments, the first DNMT domain is a human DNMT domain. In some embodiments, the first human DNMT domain is a human DNMT3A domain. In some embodiments, the human DNMT domain is a human DNMT3L domain. In some embodiments, the first DNMT domain is a mouse DNMT domain. In some embodiments, the mouse DNMT domain is a mouse DNMT3A domain. In some embodiments, the mouse DNMT domain is a mouse DNMT3L domain. In some embodiments, the first DNMT domain is a DNMT3A domain and the second DNMT domain is a DNMT3L domain. In some embodiments, the first DNMT domain is a human DNMT3A domain and the second DNMT domain is a human DNMT3L domain. In some embodiments, the first DNMT domain is a human DNMT3A domain and the second DNMT domain is a mouse DNMT3L domain. In some embodiments, the first DNMT domain is a mouse DNMT3A domain and the second DNMT domain is a human DNMT3L domain. In some embodiments, the first DNMT domain is a mouse DNMT3A domain and the second DNMT domain is a mouse DNMT3L domain. In some embodiments, the first DNMT domain is a catalytic portion of the DNMT domain. In some embodiments, the second DNMT domain is a catalytic portion of a DNMT domain. In some embodiments, the first DNMT domain and the second DNMT domain are selected from the group consisting of SEQ ID NO: 32-66.

[0015] In some embodiments, the DNA binding domain comprises a zinc finger motif. In some embodiments, the DNA binding domain comprises a zinc finger array. In some embodiments, the DNA binding domain comprises a nucleic acid guided DNA binding domain bound to a guide polynucleotide. In some embodiments, the DNA binding domain comprises CRISPR-Cas protein bound to the guide polynucleotide. In some embodiments, the guide polynucleotide hybridizes with a target sequence. In some embodiments, the CRISPR-Cas protein comprises a nuclease inactive Cas9 (dCas9). In some embodiments, the dCas9 is a dSpCas9. In some embodiments, the dSpCas9 is defined as SEQ ID NO: 3. In some embodiments, the CRISPR-Cas protein comprises a nuclease inactive Cas12a (dCas12a). In some embodiments, the CRISPR-Cas protein comprises a nuclease inactive CasX (dCasX).

[0016] In some embodiments, the fusion protein domain comprises from N-terminus to C-terminus DNMT3A-DNMT3L-dSpCas9—the repressor domain. In some embodiments, a linker connects the domains of the fusion protein. In some embodiments, the linker is an XTEN linker. In some embodiments, the XTEN linker is selected from the group consisting of: XTEN-16, XTEN-18, and XTEN-80. In some embodiments, the fusion protein comprises from N-terminus to C-terminus: DNMT3A-DNMT3L-XTEN80-dSpCas9-XTEN16—the repressor domain.

[0017] Also described herein is an epigenetic editor comprising a fusion protein, wherein the fusion protein comprises (a) a demethylase domain; (b) a DNA binding domain; and (c) an activator domain. In some embodiments, there is increased expression of the target gene when contacted with the epigenetic editor of any of the preceding claims as compared to the target gene not contacted with the epigenetic editor.

[0018] Also described herein is an epigenetic editor comprising a fusion protein, wherein the fusion protein comprises (a) a DNA binding domain; (b) a repressor domain; (c) a first catalytic domain wherein the catalytic domain is selected from the group consisting of a DNMT3A catalytic domain and a DNMT3L catalytic domain; and (d) a second catalytic domain wherein the catalytic domain is selected from the group consisting of a DNMT3A catalytic domain and a DNMT3L catalytic domain, wherein the first catalytic domain has less than 380 amino acids, or wherein the second catalytic domain has less than 380 amino acids.

[0019] Also described herein is a method for modifying an epigenetic state of a target gene in a target chromosome, the method comprising contacting the target chromosome with an epigenetic editor, wherein the epigenetic editor comprises (a) a first DNMT domain; (b) a DNA binding domain; (c) a first repressor domain; and (d) a second repressor domain, and wherein the DNA binding domain binds to a target sequence in the target chromosome and directs the epigenetic effector domain to effect a site-specific epigenetic modification in the target gene or a histone bound to the target gene in the target chromosome, thereby modifying the epigenetic state of the target gene.

[0020] Also described herein is a method for modulating expression of a target gene in a target chromosome, the method comprising contacting the target chromosome with an epigenetic editor, wherein the epigenetic editor comprises (a) a first DNMT domain; (b) a DNA binding domain; (c) a first repressor domain; and a second repressor domain, and wherein the DNA binding domain binds to a target sequence in the target chromosome and directs the epigenetic effector domain to effect a site-specific epigenetic modification in the target gene or a histone bound to the target gene in the target chromosome, thereby modulating the epigenetic state of the target gene.

[0021] Also described herein is a method for treating a disease in a subject in need thereof, the method comprising administering to the subject an epigenetic editor, wherein the epigenetic editor comprises (a) a first DNMT domain; (b) a DNA binding domain; (c) a first repressor domain; and (d) a second repressor domain, wherein the DNA binding domain binds to a target sequence in the target chromosome and directs the epigenetic effector domain to effect a site-specific epigenetic modification in the target gene or a histone bound to the target gene in the target chromosome, thereby treating the disease, wherein the target gene is associated with disease, and wherein the site-specific epigenetic modification modulates expression of the target gene, thereby treating the disease.

[0022] In some embodiments, the site-specific epigenetic modification is within 3000 base pairs upstream or downstream of the target sequence. In some embodiments, the site-specific epigenetic modification is within 2000 base pairs upstream or downstream of the target sequence. In some embodiments, the site-specific epigenetic modification is within 3000 base pairs upstream or downstream of an expression regulatory sequence. In some embodiments, the site-specific epigenetic modification is within 2000 base pairs upstream or downstream of the expression regulatory sequence. In some embodiments, the site-specific epigenetic modification is within 1000 base pairs upstream or downstream of the expression regulatory sequence.

[0023] In some embodiments, the method comprises administering to the subject a cell comprising the epigenetic editor. In some embodiments, the cell is an allogeneic cell. In some embodiments, the cell is an autologous cell. In some embodiments, the epigenetic modification is within a coding region of the target gene. In some embodiments, the target gene comprises an allele associated with a disease.

[0024] In some embodiments, the fusion protein further comprises a second DNMT domain. In some embodiments, the first DNMT domain is selected from the group consisting of a DNMT3A domain, a DNMT3B domain, a DNMT3C domain, and a DNMT3L domain. In some embodiments, the first DNMT domain is the DNMT3A domain. In some embodiments, the first DNMT domain is the DNMT3L domain. In some embodiments, the first DNMT domain is a human DNMT domain. In some embodiments, the human DNMT domain is a human DNMT3A domain. In some embodiments, the human DNMT domain is a human DNMT3L domain. In some embodiments, the first DNMT domain is a mouse DNMT domain. In some embodiments, the mouse DNMT domain is a mouse DNMT3A domain. In some embodiments, the mouse DNMT domain is a mouse DNMT3L domain. In some embodiments, the first DNMT domain is a DNMT3A domain and the second DNMT domain is a DNMT3L domain. In some embodiments, the first DNMT domain is a human DNMT3A domain and the second DNMT domain is a human DNMT3L domain. In some embodiments, the first DNMT domain is a human DNMT3A domain and the second DNMT domain is a mouse DNMT3L domain. In some embodiments, the first DNMT domain is the mouse DNMT3A domain and the second DNMT domain is a human DNMT3L domain. In some embodiments, the first DNMT domain is a mouse DNMT3A domain and the second DNMT domain is a mouse DNMT3L domain.

[0025] In some embodiments, the first DNMT domain is a catalytic portion of a DNMT domain. In some embodiments, the second DNMT domain is a catalytic portion of a DNMT domain. In some embodiments, the first DNMT domain and the second DNMT domain are selected from the group consisting of SEQ ID NO: 32-66.

[0026] In some embodiments, at least one of the repressor domains is selected from the group consisting of: ZIM3, ZNF436, ZNF257, ZNF675, ZNF490, ZNF320, ZNF331, ZNF816, ZNF680, ZNF41, ZNF189, ZNF528, ZNF543, ZNF554, ZNF140, ZNF610, ZNF264, ZNF350, ZNF8, ZNF582, ZNF30, ZNF324, ZNF98, ZNF669, ZNF677, ZNF596, ZNF214, ZNF37A, ZNF34, ZNF250, ZNF547, ZNF273, ZNF354A, ZFP82, ZNF224, ZNF33A, ZNF45, ZNF175, ZNF595, ZNF184, ZNF419, ZFP28-1, ZFP28-2, ZNF18, ZNF213, ZNF394, ZFP1, ZFP14, ZNF416, ZNF557, ZNF566, ZNF729, ZIM2, ZNF254, ZNF764, ZNF785, ZNF10, CBX5, RYBP, YAF2, MGA, CBX1, SCMH1, MPP8, SUMO3, HERC2, BIN1, PCGF2, TOX, FOXA1, FOXA2, IRF2BP1, IRF2BP2, IRF2BPL IRF-2BP1_2 N-terminal domain, HOXA13, HOXB13, HOXC13, HOXA11, HOXC11, HOXC10, HOXA10, HOXB9, HOXA9, ZFP28, ZN334, ZN568, ZN37A, ZN181, ZN510, ZN862, ZN140, ZN208, ZN248, ZN571, ZN699, ZN726, ZIK1, ZNF2, Z705F, ZNF14, ZN471, ZN624, ZNF84, ZNF7, ZN891, ZN337, Z705G, ZN529, ZN729, ZN419, Z705A, ZNF45, ZN302, ZN486, ZN621, ZN688, ZN33A, ZN554, ZN878, ZN772, ZN224, ZN184, ZN544, ZNF57, ZN283, ZN549, ZN211, ZN615, ZN253, ZN226, ZN730, Z585A, ZN732, ZN681, ZN667, ZN649, ZN470, ZN484, ZN431, ZN382, ZN254, ZN124, ZN607, ZN317, ZN620, ZN141, ZN584, ZN540, ZN75D, ZN555, ZN658, ZN684, RBAK, ZN829, ZN582, ZN112, ZN716, HKR1, ZN350, ZN480, ZN416, ZNF92, ZN100, ZN736, ZNF74, CBX1, ZN443, ZN195, ZN530, ZN782, ZN791, ZN331, Z354C, ZN157, ZN727, ZN550, ZN793, ZN235, ZNF8, ZN724, ZN573, ZN577, ZN789, ZN718, ZN300, ZN383, ZN429, ZN677, ZN850, ZN454, ZN257, ZN264, ZFP82, ZFP14, ZN485, ZN737, ZNF44, ZN596, ZN565, ZN543, ZFP69, SUMO1, ZNF12, ZN169, ZN433, SUMO3, ZNF98, ZN175, ZN347, ZNF25, ZN519, Z585B, ZIM3, ZN517, ZN846, ZN230, ZNF66, ZFP1, ZN713, ZN816, ZN426, ZN674, ZN627, ZNF20, Z587B, ZN316, ZN233, ZN611, ZN556, ZN234, ZN560, ZNF77, ZN682, ZN614, ZN785, ZN445, ZFP30, ZN225, ZN551, ZN610, ZN528, ZN284, ZN418, MPP8, ZN490, ZN805, Z780B, ZN763, ZN285, ZNF85, ZN223, ZNF90, ZN557, ZN425, ZN229, ZN606, ZN155, ZN222, ZN442, ZNF91, ZN135, ZN778, RYBP, ZN534, ZN586, ZN567, ZN440, ZN583, ZN441, ZNF43, CBX5, ZN589, ZNF10, ZN563, ZN561, ZN136, ZN630, ZN527, ZN333, Z324B, ZN786, ZN709, ZN792, ZN599, ZN613, ZF69B, ZN799, ZN569, ZN564, ZN546, ZFP92, YAF2, ZN723, ZNF34, ZN439, ZFP57, ZNF19, ZN404, ZN274, CBX3, ZNF30, ZN250, ZN570, ZN675, ZN695, ZN548, ZN132, ZN738, ZN420, ZN626, ZN559, ZN460, ZN268, ZN304, ZIM2, ZN605, ZN844, SUMO5, ZN101, ZN783, ZN417, ZN182, ZN823, ZN177, ZN197, ZN717, ZN669, ZN256, ZN251, CBX4, PCGF2, CDY2, CDYL2, HERC2, ZN562, ZN461, Z324A, ZN766, ID2, TOX, ZN274, SCMH1, ZN214, CBX7, ID1, CREM, SCX, ASCL1, ZN764, SCML2, TWST1, CREB1, TERF1, ID3, CBX8, CBX4, GSX1, NKX22, ATF1, TWST2, ZNF17, TOX3, TOX4, ZMYM3, I2BP1, RHXF1, SSX2, I2BPL, ZN680, CBX1, TR168, HXA13, PHC3, TCF24, CBX3, HXB13, HEY1, PHC2, ZNF81, FIGLA, SAM11, KMT2B, HEY2, JDP2, HXC13, ASCL4, HHEX, HERC2, GSX2, BIN1, ETV7, ASCL3, PHC1, OTP, I2BP2, VGLL2, HXA11, PDLI4, ASCL2, CDX4, ZN860, LMBL4, PDIP3, NKX25, CEBPB, ISL1, CDX2, PROP1, SIN3B, SMBT1, HXC11, HXC10, PRS6A, VSX1, NKX23, MTG16, HMX3, HMX1, KIF22, CSTF2, CEBPE, DLX2, ZMYM3, PPARG, PRIC1, UNC4, BARX2, ALX3, TCF15, TERA, VSX2, HXD12, CDX1, TCF23, ALX1, HXA10, RX, CXXC5, SCML1, NFIL3, DLX6, MTG8, CBX8, CEBPD, SEC13, FIP1, ALX4, LHX3, PRIC2, MAGI3, NELL1, PRRX1, MTG8R, RAX2, DLX3, DLX1, NKX26, NAB1, SAMD7, PITX3, WDR5, MEOX2, NAB2, DHX8, FOXA2, CBX6, EMX2, CPSF6, HXC12, KDM4B, LMBL3, PHX2A, EMX1, NC2B, DLX4, SRY, ZN777, NELL1, ZN398, GATA3, BSH, SF3B4, TEAD1, TEAD3, RGAP1, PHF1, FOXA1, GATA2, FOXO3, ZN212, IRX4, ZBED6, LHX4, SIN3A, RBBP7, NKX61, TRI68, R51A1, MB3L1, DLX5, NOTC1, TERF2, ZN282, RGS12, ZN840, SPI2B, PAX7, NKX62, ASXL2, FOXO1, GATA3, GATA1, ZMYM5, ZN783, SPI2B, LRP1, MIXL1, SGT1, LMCD1, CEBPA, GATA2, SOX14, WTIP, PRP19, CBX6, NKX11, RBBP4, DMRT2, SMCA2 and fragments thereof. In some embodiments, at least one of the repressor domains is selected from the group consisting of: SEQ ID NO: 67-595. In some embodiments, at least one of the repressor domains is selected from the group consisting of: ZIM3, ZNF264, ZN577, ZN793, ZFP28, ZN627, RYBP, TOX, TOX3, TOX4, I2BP1, SCMH1, SCML2, CDYL2, CBX8, CBX5, and CBX1, and fragments thereof.

[0027] In some embodiments, one of the repressor domains is a KRAB domain. In some embodiments, the KRAB domain is a KOX1 KRAB domain.

[0028] In some embodiments, the DNA binding domain comprises a zinc finger motif. In some embodiments, the DNA binding domain comprises a zinc finger array. In some embodiments, the DNA binding domain comprises a nucleic acid guided DNA binding domain bound to a guide polynucleotide. In some embodiments, the DNA binding domain comprises CRISPR-Cas protein bound to the guide polynucleotide. In some embodiments, wherein the guide polynucleotide hybridizes with a target sequence. In some embodiments, the CRISPR-Cas protein comprises a nuclease inactive Cas9 (dCas9). In some embodiments, the dCas9 is a dSpCas9. In some embodiments, the CRISPR-Cas protein comprises a nuclease inactive Cas12a (dCas12a). In some embodiments, the dSpCas9 is defined as SEQ ID NO: 3. In some embodiments, the CRISPR-Cas protein comprises a nuclease inactive CasX (dCasX).

[0029] In some embodiments, the fusion protein comprises from N-terminus to C-terminus DNMT3A-DNMT3L-dSpCas9-KOX1KRAB—the second repressor domain. In some embodiments, a linker connects the domains of the fusion protein. In some embodiments, the linker is an XTEN linker. In some embodiments, the XTEN linker is selected from the group consisting of: XTEN-16, XTEN-18, and XTEN-80. In some embodiments, the fusion protein comprises from N-terminus to C-terminus DNMT3A-DNMT3L-XTEN80-dSpCas9-XTEN16-KOX1KRAB-XTEN18—the second repressor domain.

[0030] Also described herein is a composition for use in the treatment of a subject, the composition comprising a fusion protein, wherein the fusion protein comprises (a) a first DNMT domain; (b) a DNA binding domain; (c) a first repressor domain; and (d) a second repressor domain.

[0031] Additional aspects and advantages of the present disclosure will become readily apparent to those skilled in this art from the following detailed description, wherein only illustrative embodiments of the present disclosure are shown and described. As will be realized, the present disclosure is capable of other and different embodiments, and its several details are capable of modifications in various obvious respects, all without departing from the disclosure. Accordingly, the drawings and description are to be regarded as illustrative in nature, and not as restrictive.

### INCORPORATION BY REFERENCE

[0032] All publications, patents, and patent applications mentioned in this specification are herein incorporated by reference to the same extent as if each individual publication, patent, or patent application was specifically and individually indicated to be incorporated by reference. To the extent publications and patents or patent applications incorporated by reference contradict the disclosure contained in the specification, the specification is intended to supersede and/or take precedence over any such contradictory material.

### BRIEF DESCRIPTION OF THE DRAWINGS

[0033] The novel features of the invention are set forth with particularity in the appended claims. A better understanding of the features and advantages of the present invention will be obtained by reference to the following detailed description that sets forth illustrative embodiments, in which the principles of the invention are utilized, and the accompanying drawings (“FIGURE.” or “FIGURES.” herein), of which:

[0034] FIG. 1 is a schematic illustration of an example DNA methylation series plasmid containing a DNMT domain, XTEN80 linker, and a dSpCas9.

[0035] FIG. 2 shows a comparison of the ability of alternate mammalian DNMT effectors and effector fusions to reduce VIM expression in HEK293 cells.

[0036] FIG. 3A-B shows a comparison of the ability of alternate DNMT effectors and effector fusions to reduce VIM expression in HEK293 cells. FIG. 3A compares the ability of the mammalian effector fusions human DNMT3A catalytic domain-mouse DNMT3L catalytic domain and human DNMT3A catalytic domain-human DNMT3L catalytic domain to reduce VIM expression in HEK293 cells to that of plant effectors and effector fusions. FIG. 3B FIG. 3A compares the ability of the mammalian effector fusions human DNMT3A catalytic domain-mouse DNMT3L catalytic domain and human DNMT3A catalytic domain-human DNMT3L catalytic domain to reduce VIM expression in HEK293 cells to that of bacterial, fungal, and Drosophila effectors and effector fusions.

[0037] FIG. 4 is a schematic illustration of an example repressor series plasmid containing a dSpCas9, an XTEN80 linker, and a repressor domain.

[0038] FIG. 5 shows a comparison of the ability of alternate KRAB and non-KRAB repressors to effectively silence VIM expression in HEK293 cells.

[0039] FIG. 6A-B are schematic illustrations of the use of alternate KRAB and non-KRAB repressor domains. FIG. 6A is a schematic illustration of an OFF series plasmid containing a DNMT3A/3L domain; an XTEN80 linker, a dSpCas9, an XTEN16 linker, and an alternate KRAB or non-KRAB repressor domain. FIG. 6B is a schematic illustration of an OFF series plasmid containing a DNMT3A/3L domain; an XTEN80 linker, a dSpCas9, an XTEN16 linker, a KOX1 KRAB domain, an XTEN18 linker, and an alternate KRAB or non-KRAB repressor domain.

[0040] FIG. 7A-7D show the ability of OFF series plasmids with various non-KRAB repressor domains to silence CD151 expression in KEH293 cells. FIG. 7A shows the results of plasmids that do not also contain a KOX1-KRAB domain; FIG. 7B shows the results of plasmids that also contain a KOX1-KRAB domain. FIG. 7C shows additional results of plasmids that do not also contain a KOX1-KRAB domain; FIG. 7D shows additional results of plasmids that also contain a KOX1-KRAB domain.

### DETAILED DESCRIPTION

[0041] While various embodiments of the disclosure have been shown and described herein, it will be obvious to those skilled in the art that such embodiments are provided by way of example only. Numerous variations, changes, and substitutions may occur to those skilled in the art without departing from the disclosure. It should be understood that various alternatives to the embodiments of the disclosure described herein may be employed.

[0042] The practice of the present invention will employ, unless otherwise indicated, conventional techniques of chemistry, biochemistry, molecular biology, microbiology and immunology, which are within the capabilities of a person of ordinary skill in the art. Such techniques are explained in the literature. See, for example, Sambrook, J., Fritsch, E. F., and Maniatis, T. (1989) Molecular Cloning: A Laboratory Manual, 2nd Edition, Cold Spring Harbor Laboratory Press; Ausubel, F. M. et al. (1995 and periodic supplements) Current Protocols in Molecular Biology, Ch. 9, 13 and 16, John Wiley & Sons; Roe, B., Crabtree, J., and Kahn, A. (1996) DNA Isolation and Sequencing: Essential Techniques, John Wiley & Sons; Polak, J. M., and McGee, J. O'D. (1990) In Situ Hybridization: Principles and Practice, Oxford University Press; Gait, M. J. (1984) Oligonucleotide Synthesis: A Practical Approach, IRL Press; and Lilley, D. M., and Dahlberg, J. E. (1992) Methods in Enzymology: DNA Structures Part A: Synthesis and Physical Analysis of DNA, Academic Press. Each of these general texts is herein incorporated by reference in its entirety.

[0043] Whenever the term “at least,” “greater than,” or “greater than or equal to” precedes the first numerical value in a series of two or more numerical values, the term “at least,” “greater than” or “greater than or equal to” applies to each of the numerical values in that series of numerical values. For example, greater than or equal to 1, 2, or 3 is equivalent to greater than or equal to 1, greater than or equal to 2, or greater than or equal to 3.

[0044] Whenever the term “no more than,” “less than,” or “less than or equal to” precedes the first numerical value in a series of two or more numerical values, the term “no more than,” “less than,” or “less than or equal to” applies to each of the numerical values in that series of numerical values. For example, less than or equal to 3, 2, or 1 is equivalent to less than or equal to 3, less than or equal to 2, or less than or equal to 1.

[0045] Use of absolute or sequential terms, for example, “will,” “will not,” “shall,” “shall not,” “must,” “must not,” “first,” “initially,” “next,” “subsequently,” “before,” “after,” “lastly,” and “finally,” are not meant to limit scope of the present embodiments disclosed herein but as exemplary.

[0046] As used herein, the singular forms “a”, “an” and “the” are intended to include the plural forms as well, unless the context clearly indicates otherwise. Furthermore, to the extent that the terms “including”, “includes”, “having”, “has”, “with”, or variants thereof are used in either the detailed description and/or the claims, such terms are intended to be inclusive in a manner similar to the term “comprising.”

[0047] As used herein, the terms, “clinic,” “clinical setting,” “laboratory” or “laboratory setting” refer to a hospital, a clinic, a pharmacy, a research institution, a pathology laboratory, a or other commercial business setting where trained personnel are employed to process and/or analyze biological and/or environmental samples. These terms are contrasted with point of care, a remote location, a home, a school, and otherwise non-business, non-institutional setting.

[0048] The terms “determining,” “measuring,” “evaluating,” “assessing,” “assaying,” and “analyzing” are often used interchangeably herein to refer to forms of measurement. The terms include determining if an element is present or not (for example, detection). These terms can include quantitative, qualitative or quantitative and qualitative determinations. Assessing is relative or absolute. “Detecting the presence of” can include determining the amount of something present in addition to determining whether it is present or absent depending on the context.

[0049] The terms “subject,” “patient”, or “individual” are often used interchangeably herein. A “subject” may be a biological entity containing expressed genetic materials. The biological entity can be a plant, animal, or microorganism, including, for example, bacteria, viruses, fungi, and protozoa. The subject can be tissues, cells and their progeny of a biological entity obtained in vivo or cultured in vitro. The subject can be a mammal. The mammal can be a human. The subject may be diagnosed or suspected of being at high risk for a disease. In some cases, the subject is not necessarily diagnosed or suspected of being at high risk for the disease. A subject may or may not have been exposed to a pathogen of interest as described herein, and may by symptomatic or symptomatic of a disease or condition associated with infection of or exposure to a pathogen as described herein. In some embodiments, a subject is suspected to have been exposed to a pathogen, e.g. a virus. In some embodiments, a subject has been exposed to an antigen or a protein representative or cross-reacts with antigens of a particular pathogen, e.g. a virus. In some embodiments, a subject has one or more symptoms that are indicative of a disease or condition associated with infection of or exposure to a pathogen as described herein. In some embodiments, the subject is currently infected by a pathogen, e.g. a virus described herein. In some embodiments, the subject is previously infected by a pathogen described herein. In some embodiments, a subject is a carrier of a virus described herein. In some embodiments, a subject is a carrier of fragments or remnants of a virus described herein. In some instances, a subject is carrier of adaptive immunity stemmed from previously or currently being infected by a virus described herein. In some embodiments, a subject is a carrier of adaptive immunity stemmed from previous or current exposure to a different virus or pathogen other than a virus or pathogen of interest.

[0050] The term “subject” encompasses mammals. Examples of mammals include, but are not limited to, any member of the mammalian class: humans, non-human primates such as chimpanzees, and other apes and monkey species; farm animals such as cattle, horses, sheep, goats, swine; domestic animals such as rabbits, dogs, and cats; laboratory animals including rodents, such as rats, mice and guinea pigs, and the like.

[0051] The term “about” or “approximately” means within an acceptable error range for the particular value as determined by one of ordinary skill in the art, which will depend in part on how the value is measured or determined, e.g., the limitations of the measurement system. For example, “about” can mean within 1 or more than 1 standard deviation, per the practice in the given value. Where particular values are described in the application and claims, unless otherwise stated the term “about” should be assumed to mean an acceptable error range for the particular value.

[0052] As used herein, the phrases “at least one”, “one or more”, and “and/or” are open-ended expressions that are both conjunctive and disjunctive in operation. For example, each of the expressions “at least one of A, B and C”, “at least one of A, B, or C”, “one or more of A, B, and C”, “one or more of A, B, or C” and “A, B, and/or C” means A alone, B alone, C alone, A and B together, A and C together, B and C together, or A, B and C together.

[0053] The term “nucleic acid” as used herein refers to a polymer containing at least two nucleotides (i.e., deoxyribonucleotides or ribonucleotides) in either single- or double-stranded form and includes DNA and RNA. “Nucleotides” contain a sugar deoxyribose (DNA) or ribose (RNA), a base, and a phosphate group. Nucleotides are linked together through the phosphate groups. “Bases” include purines and pyrimidines, which further include natural compounds adenine, thymine, guanine, cytosine, uracil, inosine, and natural analogs, and synthetic derivatives of purines and pyrimidines, which include, but are not limited to, modifications which place new reactive groups such as, but not limited to, amines, alcohols, thiols, carboxylates, and alkylhalides. Nucleic acids include nucleic acids containing known nucleotide analogs or modified backbone residues or linkages, which are synthetic, naturally occurring, and non-naturally occurring, and which have similar binding properties as the reference nucleic acid. Examples of such analogs and/or modified residues include, without limitation, phosphorothioates, phosphoramidates, methyl phosphonates, chiral-methyl phosphonates, 2′-O-methyl ribonucleotides, and peptide-nucleic acids (PNAs).

[0054] The term “nucleic acid” includes any oligonucleotide or polynucleotide, with fragments containing up to 60 nucleotides generally termed oligonucleotides, and longer fragments termed polynucleotides. A deoxyribooligonucleotide consists of a 5-carbon sugar called deoxyribose joined covalently to phosphate at the 5′ and 3′ carbons of this sugar to form an alternating, unbranched polymer. DNA may be in the form of, e.g., antisense molecules, plasmid DNA, pre-condensed DNA, a PCR product, vectors, expression cassettes, chimeric sequences, chromosomal DNA, or derivatives and combinations of these groups. A ribooligonucleotide consists of a similar repeating structure where the 5-carbon sugar is ribose. Accordingly, the terms “polynucleotide” and “oligonucleotide” can refer to a polymer or oligomer of nucleotide or nucleoside monomers consisting of naturally-occurring bases, sugars and intersugar (backbone) linkages. The terms “polynucleotide” and “oligonucleotide” can also include polymers or oligomers comprising non-naturally occurring monomers, or portions thereof, which function similarly. Such modified or substituted oligonucleotides are often preferred over native forms because of properties such as, for example, enhanced cellular uptake, reduced immunogenicity, and increased stability in the presence of nucleases.

[0055] The “nucleic acid” described herein may include one or more nucleotide variants, including nonstandard nucleotide(s), non-natural nucleotide(s), nucleotide analog(s), and/or modified nucleotides. Examples of modified nucleotides include, but are not limited to diaminopurine, 5-fluorouracil, 5-bromouracil, 5-chlorouracil, 5-iodouracil, hypoxanthine, xantine, 4-acetylcytosine, 5-(carboxyhydroxylmethyl)uracil, 5-carboxymethylaminomethyl-2-thiouridine, 5-carboxymethylaminomethyluracil, dihydrouracil, beta-D-galactosylqueosine, inosine, N6-isopentenyladenine, 1-methylguanine, 1-methylinosine, 2,2-dimethylguanine, 2-methyladenine, 2-methylguanine, 3-methylcytosine, 5-methylcytosine, N6-adenine, 7-methylguanine, 5-methylaminomethyluracil, 5-methoxyaminomethyl-2-thiouracil, beta-D-mannosylqueosine, 5′-methoxycarboxymethyluracil, 5-methoxyuracil, 2-methylthio-N6-isopentenyladenine, uracil-5-oxyacetic acid (v), wybutoxosine, pseudouracil, queosine, 2-thiocytosine, 5-methyl-2-thiouracil, 2-thiouracil, 4-thiouracil, 5-methyluracil, uracil-5-oxyacetic acid methylester, 5-methyl-2-thiouracil, 3-(3-amino-3-N-2-carboxypropyl) uracil, (acp3)w, 2,6-diaminopurine and the like. In some cases, nucleotides may include modifications in their phosphate moieties, including modifications to a triphosphate moiety. Non-limiting examples of such modifications include phosphate chains of greater length (e.g., a phosphate chain having, 4, 5, 6, 7, 8, 9, 10 or more phosphate moieties) and modifications with thiol moieties (e.g., alpha-thiotriphosphate and beta-thiotriphosphates).

[0056] The nucleic acid described herein may be modified at the base moiety (e.g., at one or more atoms that typically are available to form a hydrogen bond with a complementary nucleotide and/or at one or more atoms that are not typically capable of forming a hydrogen bond with a complementary nucleotide), sugar moiety, or phosphate backbone. Backbone modifications can include, but are not limited to, a phosphorothioate, a phosphorodithioate, a phosphoroselenoate, a phosphorodiselenoate, a phosphoroanilothioate, a phosphoraniladate, a phosphoramidate, and a phosphorodiamidate linkage. A phosphorothioate linkage substitutes a sulfur atom for a non-bridging oxygen in the phosphate backbone and delay nuclease degradation of oligonucleotides. A phosphorodiamidate linkage (N3′→P5′) allows prevents nuclease recognition and degradation. Backbone modifications can also include having peptide bonds instead of phosphorous in the backbone structure (e.g., N-(2-aminoethyl)-glycine units linked by peptide bonds in a peptide nucleic acid), or linking groups including carbamate, amides, and linear and cyclic hydrocarbon groups. Oligonucleotides with modified backbones are reviewed in Micklefield, Backbone modification of nucleic acids: synthesis, structure and therapeutic applications, Curr. Med. Chem., 8 (10): 1157-79, 2001 and Lyer et al., Modified oligonucleotides-synthesis, properties and applications, Curr. Opin. Mol. Ther., 1 (3): 344-358, 1999. Nucleic acid molecules described herein may contain a sugar moiety that comprises ribose or deoxyribose, as present in naturally occurring nucleotides, or a modified sugar moiety or sugar analog. The examples of modified sugar moieties include, but are not limited to, 2′-O-methyl, 2′-O-methoxyethyl, 2′-O-aminoethyl, 2′-Flouro, N3′→P5′ phosphoramidate, 2′dimethylaminooxyethoxy, 2′ 2′dimethylaminoethoxyethoxy, 2′-guanidinidium, 2′-O-guanidinium ethyl, carbamate modified sugars, and bicyclic modified sugars. 2′-O-methyl or 2′-O-methoxyethyl modifications promote the A-form or RNA-like conformation in oligonucleotides, increase binding affinity to RNA, and have enhanced nuclease resistance. Modified sugar moieties can also include having an extra bridge bond (e.g., a methylene bridge joining the 2′-O and 4′-C atoms of the ribose in a locked nucleic acid) or sugar analog such as a morpholine ring (e.g., as in a phosphorodiamidate morpholino).

[0057] Unless otherwise indicated, a particular nucleic acid sequence also implicitly encompasses conservatively modified variants thereof (e.g., degenerate codon substitutions), alleles, orthologs, SNPs, and complementary sequences as well as the sequence explicitly indicated. Specifically, degenerate codon substitutions may be achieved by generating sequences in which the third position of one or more selected (or all) codons is substituted with mixed-base and/or deoxyinosine residues (Batzer et al., Nucleic Acid Res., 19:5081 (1991); Ohtsuka et al., J. Biol. Chem., 260:2605-2608 (1985); Rossolini et al., Mol. Cell. Probes, 8:91-98 (1994).

[0058] The present disclosure encompasses isolated or substantially purified nucleic acid molecules and compositions containing those molecules. As used herein, an “isolated” or “purified” DNA molecule or RNA molecule is a DNA molecule or RNA molecule that exists apart from its native environment. An isolated DNA molecule or RNA molecule may exist in a purified form or may exist in a non-native environment such as, for example, a transgenic host cell. For example, an “isolated” or “purified” nucleic acid molecule or biologically active portion thereof, is substantially free of other cellular material, or culture medium when produced by recombinant techniques, or substantially free of chemical precursors or other chemicals when chemically synthesized. In one embodiment, an “isolated” nucleic acid is free of sequences that naturally flank the nucleic acid (i.e., sequences located at the 5′ and 3′ ends of the nucleic acid) in the genomic DNA of the organism from which the nucleic acid is derived. For example, in some embodiments, the isolated nucleic acid molecule can contain less than about 5 kb, 4 kb, 3 kb, 2 kb, 1 kb, 0.5 kb, or 0.1 kb of nucleotide sequences that naturally flank the nucleic acid molecule in genomic DNA of the cell from which the nucleic acid is derived.

[0059] As used herein, the terms “protein,” “polypeptide,” and “peptide” are used interchangeably and refer to a polymer of amino acid residues linked via peptide bonds and which may be composed of two or more polypeptide chains. The terms “polypeptide,” “protein,” and “peptide” refer to a polymer of at least two amino acid monomers joined together through amide bonds. An amino acid may be the L-optical isomer or the D-optical isomer. More specifically, the terms “polypeptide,” “protein,” and “peptide” refer to a molecule composed of two or more amino acids in a specific order; for example, the order as determined by the base sequence of nucleotides in the gene or RNA coding for the protein. Proteins are essential for the structure, function, and regulation of the body's cells, tissues, and organs, and each protein has unique functions. Examples are hormones, enzymes, antibodies, and any fragments thereof. In some cases, a protein can be a portion of the protein, for example, a domain, a subdomain, or a motif of the protein. In some cases, a protein can be a variant (or mutation) of the protein, wherein one or more amino acid residues are inserted into, deleted from, and/or substituted into the naturally occurring (or at least a known) amino acid sequence of the protein. A polypeptide can be a single linear polymer chain of amino acids bonded together by peptide bonds between the carboxyl and amino groups of adjacent amino acid residues. Polypeptides can be modified, for example, by the addition of carbohydrate, phosphorylation, etc. Proteins can comprise one or more polypeptides.

[0060] A protein or a variant thereof can be naturally occurring or recombinant. Methods for detection and/or measurement of polypeptides in biological material are well known in the art and include, but are not limited to, Western-blotting, flow cytometry, ELISAs, RIAs, and various proteomics techniques. An exemplary method to measure or detect a polypeptide is an immunoassay, such as an ELISA. This type of protein quantitation can be based on an antibody capable of capturing a specific antigen, and a second antibody capable of detecting the captured antigen. Exemplary assays for detection and/or measurement of polypeptides are described in Harlow, E. and Lane, D. Antibodies: A Laboratory Manual, (1988), Cold Spring Harbor Laboratory Press.

[0061] As used herein, the terms “fragment,” or equivalent terms can refer to a portion of a protein that has less than the full length of the protein and optionally maintains the function of the protein. Further, when the portion of the protein is blasted against the protein, the portion of the protein sequence can align, for example, at least with 80% identity to a part of the protein sequence.

[0062] Any systems, methods, and platforms described herein are modular and not limited to sequential steps. Accordingly, terms such as “first” and “second” do not necessarily imply priority, order of importance, or order of acts.

[0063] The term “modulate” refers to a change in the quantity, degree or extent of a function. For example, the compositions for epigenetic modification disclosed herein may modulate the activity of a promoter sequence by binding to a motif within the promoter, thereby inducing, enhancing or suppressing transcription of a gene operatively linked to the promoter sequence. Alternatively, modulation may include inhibition of transcription of a gene wherein the epigenetic editor binds to the structural gene and blocks DNA dependent RNA polymerase from reading through the gene, thus inhibiting transcription of the gene. The structural gene may be a normal cellular gene or an oncogene, for example. Alternatively, modulation may include inhibition of translation of a transcript. Thus, “modulation” of gene expression includes both gene activation and gene repression.

[0064] The term “Administering” and its grammatical equivalents as used herein can refer to providing one or more replication competent recombinant adenovirus or pharmaceutical compositions described herein to a subject or a patient. By way of example and without limitation, “administering” can be performed by intravenous (i.v.) injection, sub-cutaneous (s.c.) injection, intradermal (i.d.) injection, intraperitoneal (i.p.) injection, intramuscular (i.m.) injection, intravascular injection, infusion (inf.), oral routes (p.o.), topical (top.) administration, or rectal (p.r.) administration. One or more such routes can be employed. Parenteral administration can be, for example, by bolus injection or by gradual perfusion over time.

[0065] The terms “treat,” “treating,” or “treatment,” and grammatical equivalents as used herein, can include alleviating, abating, or ameliorating at least one symptom of a disease or a condition, preventing additional symptoms, inhibiting the disease or the condition, e.g., arresting the development of the disease or the condition, relieving the disease or the condition, causing regression of the disease or the condition, relieving a condition caused by the disease or the condition, or stopping the symptoms of the disease or the condition either prophylactically and/or therapeutically. “Treating” may refer to administration of a vector, nucleic acid (e.g. mRNA), or LNP composition to a subject after the onset, or suspected onset, of a disease or condition. “Treating” includes the concepts of “alleviating,” which refers to lessening the frequency of occurrence or recurrence, or the severity, of any symptoms or other ill effects related to a disease or condition and/or the side effects associated with the disease or condition. The term “treating” also encompasses the concept of “managing” which refers to reducing the severity of a particular disease or disorder in a patient or delaying its recurrence, e.g., lengthening the period of remission in a patient who had suffered from the disease. The term “treating” further encompasses the concept of “prevent,” “preventing,” and “prevention.” It is appreciated that, although not precluded, treating a disorder or condition does not require that the disorder, condition, or symptoms associated therewith be completely eliminated. The term “treatment” as used herein covers any treatment of a disease in a mammal, particularly, a human, and includes: (a) preventing the disease from occurring in a subject which may be predisposed to the disease but has not yet been diagnosed as having it; (b) inhibiting the disease, i.e., arresting its development; or (c) relieving the disease, i.e., mitigating or ameliorating the disease and/or its symptoms or conditions. The term “prophylaxis” is used herein to refer to a measure or measures taken for the prevention or partial prevention of a disease or condition.

[0066] By “treating or preventing a condition” is meant ameliorating any of the conditions or signs or symptoms associated with the disorder before or after it has occurred. For example, as compared with an equivalent untreated control, alleviating a symptom of a disorder may involve reduction or degree of prevention at least 3%, 5%, 10%, 20%, 40%, 50%, 60%, 80%, 90%, 95%, 98%, 99%, 99.5%, 99.9%, or 100% as measured by any standard technique. In some embodiments, alleviating a symptom of a disorder may involve reduction or degree of prevention by at least 2 fold, at least 3 fold, at least 4 fold, at least 5 fold, at least 10 fold, at least 20 fold, at least 25 fold, at least 30 fold, at least 40 fold, at least 50 fold, at least 60 fold, at least 70 fold, at least 80 fold, at least 90 fold, at least 100 fold, at least 200 fold, at least 300 fold, at least 400 fold, at least 500 fold, at least 600 fold, at least 700 fold, at least 800 fold, at least 900 fold, at least 1000 fold, at least 2000 fold, at least 3000 fold, at least 4000 fold, at least 5000 fold, at least 6000 fold, at least 7000 fold, at least 8000 fold, at least 9000 fold, or at least 10000 fold as compared with an equivalent untreated control.

[0067] The terms “pharmaceutical composition” and its grammatical equivalents as used herein can refer to a mixture or solution comprising a therapeutically effective amount of an active pharmaceutical ingredient together with one or more pharmaceutically acceptable excipients, carriers, and/or a therapeutic agent to be administered to a subject, e.g., a human in need thereof.

[0068] The term “pharmaceutically acceptable” and its grammatical equivalents as used herein can refer to an attribute of a material which is useful in preparing a pharmaceutical composition that is generally safe, non-toxic, and neither biologically nor otherwise undesirable and is acceptable for veterinary as well as human pharmaceutical use. “Pharmaceutically acceptable” can refer a material, such as a carrier or diluent, which does not abrogate the biological activity or properties of the compound, and is relatively nontoxic, i.e., the material may be administered to a subject without causing undesirable biological effects or interacting in a deleterious manner with any of the components of the pharmaceutical composition in which it is contained.

[0069] A “pharmaceutically acceptable excipient, carrier, or diluent” refers to an excipient, carrier, or diluent that can be administered to a subject, together with an agent, and which does not destroy the pharmacological activity thereof and is nontoxic when administered in doses sufficient to deliver a therapeutic amount of the agent.

[0070] A “pharmaceutically acceptable salt” may be an acid or base salt that is generally considered in the art to be suitable for use in contact with the tissues of human beings or animals without excessive toxicity, irritation, allergic response, or other problem or complication. Such salts include mineral and organic acid salts of basic residues such as amines, as well as alkali or organic salts of acidic residues such as carboxylic acids. Specific pharmaceutical salts include, but are not limited to, salts of acids such as hydrochloric, phosphoric, hydrobromic, malic, glycolic, fumaric, sulfuric, sulfamic, sulfanilic, formic, toluenesulfonic, methanesulfonic, benzene sulfonic, ethane disulfonic, 2-hydroxyethyl sulfonic, nitric, benzoic, 2-acetoxybenzoic, citric, tartaric, lactic, stearic, salicylic, glutamic, ascorbic, pamoic, succinic, fumaric, maleic, propionic, hydroxymaleic, hydroiodic, phenylacetic, alkanoic such as acetic, HOOC—(CH2)n-COOH where n is 0-4, and the like. Similarly, pharmaceutically acceptable cations include, but are not limited to sodium, potassium, calcium, aluminum, lithium and ammonium. Those of ordinary skill in the art will recognize from this disclosure and the knowledge in the art that further pharmaceutically acceptable salts include those listed by Remington's Pharmaceutical Sciences, 17th ed., Mack Publishing Company, Easton, PA, p. 1418 (1985). In general, a pharmaceutically acceptable acid or base salt can be synthesized from a parent compound that contains a basic or acidic moiety by any conventional chemical method. Briefly, such salts can be prepared by reacting the free acid or base forms of these compounds with a stoichiometric amount of the appropriate base or acid in an appropriate solvent.

[0071] As used herein, the term “therapeutically effective amount” means an amount of an agent to be delivered (e.g., nucleic acid, drug, payload, composition, therapeutic agent, diagnostic agent, prophylactic agent, etc.) that is sufficient, when administered to a subject suffering from or susceptible to an infection, disease, disorder, and/or condition, to treat, improve symptoms of, diagnose, prevent, and/or delay the onset of the infection, disease, disorder, and/or condition.

[0072] The term “repressor domain” or “repression domain” are terms known in the art. Such domains typically refer to a part of a transcription repression protein which provides for the transcriptional repressive effect on a target gene, for example by participating in a reaction on the DNA or chromatin (e.g., methylation), by binding to an agent from within the nucleus to result in the repression of the transcription of the target gene or by inhibiting the recruitment of a protein in the natural transcriptional machinery that transcribes the target gene. Examples of repressor domains of this invention are provided through the specification.

[0073] The term “KRAB” or “KRAB domain” is a term known in the art. KRAB is also known as Krippel associated box, a transcription repressor domain. A description of KRAB domains, including their function and use, may be found, for example, in Ecco, G., Imbeault, M., Trono, D., KRAB zinc finger proteins, Development 144, 2017 and Lambert S A, Jolma A, Campitelli L F, Das P K, Yin Y, Albu M, Chen X, Taipale J, Hughes T R, Weirauch M T, 2018, The human transcription factors, Cell 172: 650-665, 10.1016/j.cell.2018.01.029, which are incorporated by reference in their entirety. Examples of KRAB domains are also provided throughout the specification.

[0074] The term “DNMT” is a term known in the art. DNMT is also known as DNA methyltransferase. DNMT refers to an enzyme that catalyzes the transfer of a methyl group to DNA. Non-limiting examples of DNA methyltransferases include DNMT, DNMT3A, DNMT3B, DNMT3C and DNMT3L. In one preferred embodiment, a catalytic domain(s) of a DNMT is used in the invention.

[0075] The term “DNA binding domain” is a term known in the art. DNA binding domain typically refers to a part of a protein which binds to DNA in a nucleus. In one embodiment of this invention, a DNA-binding domain is a DNA binding region of a protein selected from a CRISPR Cas protein, a TAL protein, a zinc finger protein, a transcription repression protein, a transcription activation protein, or an variants thereon that bind DNA.

[0076] Ranges provided herein are understood to be shorthand for all of the values within the range. For example, a range of 1 to 50 is understood to include any number, combination of numbers, or sub-range from the group consisting of 1, 2, 3, 4, 5, 6, 7, 8, 9, 10, 11, 12, 13, 14, 15, 16, 17, 18, 19, 20, 21, 22, 23, 24, 25, 26, 27, 28, 29, 30, 31, 32, 33, 34, 35, 36, 37, 38, 39, 40, 41, 42, 43, 44, 45, 46, 47, 48, 49, or 50, as well as all intervening decimal values between the aforementioned integers such as, for example, 1.1, 1.2, 1.3, 1.4, 1.5, 1.6, 1.7, 1.8, and 1.9. With respect to sub-ranges, “nested sub-ranges” that extend from either end point of the range are specifically contemplated. For example, a nested sub-range of an exemplary range of 1 to 50 may comprise 1 to 10, 1 to 20, 1 to 30, and 1 to 40 in one direction, or 50 to 40, 50 to 30, 50 to 20, and 50 to 10 in the other direction.

[0077] The term “therapeutic agent” can refer to any agent that, when administered to a subject, has a therapeutic, diagnostic, and/or prophylactic effect and/or elicits a desired biological and/or pharmacological effect. Therapeutic agents can also be referred to as “actives” or “active agents.” Such agents include, but are not limited to, cytotoxins, radioactive ions, chemotherapeutic agents, small molecule drugs, proteins, and nucleic acids.

[0078] The term “ameliorate” as used herein can refer to decrease, suppress, attenuate, diminish, arrest, or stabilize the development or progression of a disease.

[0079] As used therein, “delaying” the development of a disease means to defer, hinder, slow, retard, stabilize, and/or postpone progression of the disease. This delay can be of varying lengths of time, depending on the history of the disease and/or individuals being treated. A method that “delays” or alleviates the development of a disease, or delays the onset of the disease, is a method that reduces probability of developing one or more symptoms of the disease in a given time frame and/or reduces extent of the symptoms in a given time frame, when compared to not using the method. Such comparisons are typically based on clinical studies, using a number of subjects sufficient to give a statistically significant result.

[0080] “Development” or “progression” of a disease means initial manifestations and/or ensuing progression of the disease. Development of the disease can be detectable and assessed using standard clinical techniques as well known in the art. However, development also refers to progression that may be undetectable. For purpose of this disclosure, development or progression refers to the biological course of the symptoms. “Development” includes occurrence, recurrence, and onset.

[0081] As used herein, “onset” or “occurrence” of a disease includes initial onset and/or recurrence. Conventional methods, known to those of ordinary skill in the art of medicine, can be used to administer the isolated polypeptide or pharmaceutical composition to the subject, depending upon the type of disease to be treated or the site of the disease. This composition can also be administered via other conventional routes, e.g., administered orally, parenterally, by inhalation spray, topically, rectally, nasally, buccally, vaginally or via an implanted reservoir.

[0082] The term “parenteral” as used herein includes subcutaneous, intracutaneous, intravenous, intramuscular, intraarticular, intraarterial, intrasynovial, intrastemal, intrathecal, intralesional, and intracranial injection or infusion techniques. In addition, it can be administered to the subject via injectable depot routes of administration such as using 1-, 3-, or 6-month depot injectable or biodegradable materials and methods.

[0083] It will be understood that in addition to the specific proteins and nucleotides mentioned herein, the present invention also contemplates the use of variants, derivatives, homologues and fragments thereof. As used herein, a variant of any given sequence is a sequence in which the specific sequence of residues (whether amino acid or nucleic acid residues) has been modified in such a manner that the polypeptide or polynucleotide in question substantially retains at least one of its endogenous functions. A variant sequence can be obtained by addition, deletion, substitution, modification, replacement and/or variation of at least one residue present in the naturally-occurring protein. As used herein, a derivative of any given sequence as contemplated includes any substitution of, variation of, modification of, replacement of, deletion of and/or addition of one (or more) amino acid residues from or to the sequence providing that the resultant protein or polypeptide substantially retains at least one of its endogenous functions. Amino acid substitutions may be made, for example from 1, 2 or 3 to 10 or 20 substitutions provided that the modified sequence substantially retains the required activity or ability. Amino acid substitutions may include the use of non-naturally occurring analogues. Proteins used in the present disclosure may also have deletions, insertions or substitutions of amino acid residues which do not affection function of the protein and result in a functionally equivalent protein. Deliberate amino acid substitutions may be made on the basis of similarity in polarity, charge, solubility, hydrophobicity, hydrophilicity and/or the amphipathic nature of the residues as long as the endogenous function is retained. For example, negatively charged amino acids include aspartic acid and glutamic acid; positively charged amino acids include lysine and arginine; and amino acids with uncharged polar head groups having similar hydrophilicity values include asparagine, glutamine, serine, threonine and tyrosine.

[0084] As used herein, a homologue of any herein contemplated protein or nucleic acid sequence includes sequences having a certain homology with the wild type amino acid and nucleic sequence. A homologous sequence may include a sequence, e.g. an amino acid sequence which may be at least 50%, 55%, 65%, 75%, 85% or 90% identical to the subject sequence. In particular embodiments, a homologous sequence may include an amino acid sequence at least 95% or 97% or 99% identical to the subject sequence.

[0085] Sequence identity may be measured using sequence analysis software (for example, Sequence Analysis Software Package of the Genetics Computer Group, University of Wisconsin Biotechnology Center, 1710 University Avenue, Madison, Wis. 53705, BLAST, BESTFIT, GAP, or PILEUP/PRETTYBOX programs). Such software matches identical or similar sequences by assigning degrees of homology to various substitutions, deletions, and/or other modifications. Conservative substitutions typically include substitutions within the following groups: glycine, alanine; valine, isoleucine, leucine; aspartic acid, glutamic acid, asparagine, glutamine; serine, threonine; lysine, arginine; and phenylalanine, tyrosine. In an exemplary approach to determining the degree of identity, a BLAST program may be used, with a probability score between e-3 and e-100 indicating a closely related sequence.

[0086] It will be understood that the numbering of the specific positions or residues in the respective sequences depends on the particular protein and numbering scheme used. Numbering might be different, e.g., in precursors of a mature protein and the mature protein itself, and differences in sequences from species to species may affect numbering. One of skill in the art will be able to identify the respective residue in any homologous protein and in the respective encoding nucleic acid by methods well known in the art, e.g., by sequence alignment and determination of homologous residues.

### Nucleic Acid Binding Domains

[0087] Epigenetic editors and epigenetic editing complexes described herein may comprise one or more nucleic acid binding protein domains, e.g. DNA binding domains, that may direct the epigenetic editor to a target gene associated with a certain condition.

[0088] As used herein, a target gene can comprise all nucleotide sequences of a gene of interest. For example, sequences or nucleotides of a target gene can include coding sequences and non-coding sequences. Sequence of a target gene can include exons or introns. Sequences of a target gene can include regulatory regions, including promoters, enhancers, terminators, 5′ or 3′ untranslated regions. In some embodiments, a sequence of a target gene comprises a remote enhancer sequence.

[0089] An epigenetic editor as described herein can comprise any polynucleotide binding domain. In some embodiments, the nucleic acid binding domain comprises one or more DNA binding proteins, for example, zinc finger proteins (ZFPs) or transcription activator like effectors (TALEs). In some embodiments, the nucleic acid binding domain comprises a polynucleotide guided DNA binding protein, for example, a nuclease inactive CRISPR-Cas protein guided by a guide RNA.

[0090] The nucleic acid binding domain of epigenetic editors described herein may be capable of recognizing and binding any gene of interest, for example, target genes associated with a disease or disorder. In some embodiments, the target gene associated with a disease or disorder contains a mutation as compared to a wild type gene. In some embodiments, the target gene associated with a disease or disorder contains a copy that harbors a mutation associated with the disease or disorder. In some embodiments, the target gene associated with a disease or disorder has one or both copies of wild type DNA sequences.

[0091] A DNA binding domain maybe modular and/or programmable. In some embodiments, the DNA binding domain comprises a zinc finger domain, a transcription activator like effector (TALE) domain, a meganuclease DNA binding domain or a polynucleotide guided nucleic acid binding domain. Examples of DNA binding domains can be found in U.S. Pat. No. 11,162,114, which is incorporated by reference in its entirety.

[0092] Transcription activator-like effectors (TALEs) can be engineered to bind practically any desired DNA sequence. Methods for programming TALEs are familiar to one skilled in the art. For example, such methods are described in Carroll et al, Genetics Society of America, 188 (4): 773-782, 2011; Miller et al., Nature Biotechnology 25 (7): 778-785, 2007; Christian et al, Genetics 186 (2): 757-61, 2008; Li et al, Nucleic Acids Res. 39 (1): 359-372, 2010; and Moscou et al, Science 326 (5959): 1501, 2009, each of which are incorporated herein by reference.

[0093] A DNA binding domain may be directed by a nucleic acid sequence, for example, a RNA sequence, to identify the target gene. In some embodiments, the DNA binding domain comprises a programmable nuclease. In some embodiments, the DNA binding domain comprises a programmable nuclease with reduced or abrogated nuclease activity. For example, a programmable nuclease may harbor one or two mutations in its catalytic domain that renders the nuclease inactive, but maintain DNA binding activity of the nuclease. In some embodiments, the DNA binding domain comprises a CRISPR-Cas protein domain. In some embodiments, the CRISPR-Cas protein domain lacks or has reduced nuclease activity.

[0094] In some embodiments, an epigenetic editor provided herein comprises a Cas protein, e.g. a Cas9 protein domain. The Cas9 domain may be any of the Cas9 domains or Cas9 proteins (e.g., nuclease inactive Cas9 or Cas9 nickase, or a Cas9 variant from any species) provided herein. In some embodiments, any of the Cas domains or Cas proteins provided herein may be fused with one or more any effector protein domain as described herein. In some embodiments, any of the Cas protein domains provided herein may be fused with two or more effector protein domains as described herein. Cas9 can refer to a polypeptide with at least about 50%, 60%, 70%, 80%, 90%, 100% sequence identity and/or sequence similarity to a wild type exemplary Cas9 polypeptide (e.g., from S. pyogenes). Cas9 can refer to the wild type or a modified form of the Cas9 protein that can comprise an amino acid change such as a deletion, insertion, substitution, variant, mutation, fusion, chimera, or any combination thereof.

[0095] Cas9 sequences and structures of variant Cas9 orthologs have been described in various species. Exemplary species that the Cas9 protein or other components can be from include, but are not limited to, Streptococcus pyogenes, Streptococcus thermophilus, Streptococcus sp., Staphylococcus aureus, Listeria innocua, Lactobacillus gasseri, Francisella novicida, Wolinella succinogenes, Sutterella wadsworthensis, Gamma proteobacterium, Neisseria meningitidis, Campylobacter jejuni, Pasteurella multocida, Fibrobacter succinogene, Rhodospirillum rubrum, Nocardiopsis dassonvillei, Streptomyces pristinaespiralis, Streptomyces viridochromogenes, Streptomyces viridochromogenes, Streptosporangium roseum, Alicyclobacillus acidocaldarius, Bacillus pseudomycoides, Bacillus selenitireducens, Exiguobacterium sibiricum, Lactobacillus delbrueckii, Lactobacillus salivarius, Lactobacillus buchneri, Treponema denticola, Microscilla marina, Burkholderiales bacterium, Polar omonas naphthalenivorans, Polar omonas sp., Crocosphaera watsonii, Cyanothece sp., Microcystis aeruginosa, Synechococcus sp., Acetohalobium arabaticum, Ammonifex degensii, Caldicelulosiruptor becscii, Candidatus Desulforudis, Clostridium botulinum, Clostridium difficile, Finegoldia magna, Natranaerobius thermophilus, Pelotomaculum thermopropionium, Acidithiobacillus caldus, Acidithiobacillus ferrooxidans, Allochromatium vinosum, Marinobacter sp., Nitrosococcus halophilus, Nitrosococcus watsoni, Pseudoalteromonas haloplanktis, Ktedonobacter racemifer, Methanohalobium evestigatum, Anabaena variabilis, Nodularia spumigena, Nostoc sp., Arthrospira maxima, Arthrospira platensis, Arthrospira sp., Lyngbya sp., Microcoleus chthonoplastes, Oscillator ia sp., Petrotoga mobilis, Thermosipho africanus, Streptococcus pasteurianus, Neisseria cinerea, Campylobacter lari, Parvibaculum lavamentivorans, Coryne bacterium diphtheria, or Acaryochloris marina. In some embodiments, the Cas9 protein is from Streptococcus pyogenes. In some embodiments, the Cas9 protein may be from Streptococcus thermophilus. In some embodiments, the Cas9 protein is from Staphylococcus aureus.

[0096] Additional suitable Cas9 proteins, orthologs, variants, including nuclease inactive variants and sequences will be apparent to those of skill in the art based on this disclosure, and such Cas9 nucleases and sequences include Cas9 sequences from the organisms and loci disclosed in Chylinski et al., (2013) RNA Biology 10:5, 726-737; which are incorporated herein by reference.

[0097] In some embodiments, wild-type Cas9 corresponds to Cas9 from Streptococcus pyogenes (NCBI Reference Sequence: NC_002737.2 (SEQ ID NO.: 1); and Uniprot Reference Sequence: Q99ZW2 (SEQ ID NO.: 2).

[0098] An epigenetic editor may comprise a nuclease inactive Cas9 domain (dead Cas9 or dCas9). The dCas9 protein domain may comprise one, two, or more mutations as compared to a wild type Cas9 that abrogate its nuclease activity, but retains the DNA binding activity. For example, the DNA cleavage domain of Cas9 is known to include two subdomains, the HNH nuclease subdomain and the RuvC1 subdomain. The HNH subdomain cleaves the strand complementary to the gRNA, whereas the RuvC1 subdomain cleaves the non-complementary strand. Mutations within these subdomains can silence the nuclease activity of Cas9. For example, the mutations D10A and H840A completely inactivate the nuclease activity of S. pyogenes Cas9. In some embodiments, the dCas9 comprises at least one mutation in the HNH subdomain and the RuvC subdomain that reduces or abrogates nuclease activity. In some embodiments, the dCas9 only comprises a RuvC subdomain. In some embodiments, the dCas9 only comprises a HNR subdomain. It is to be understood that any mutation that inactivates the RuvC or the HNH domain may be included in a dCas9, e.g., insertion, deletion, or single or multiple amino acid substitution in the RuvC domain and/or the HNH domain.

[0099] In some embodiments, the dCas9 protein comprises a mutation at position D10 as numbered in the wild type Cas9 sequence as numbered in Uniprot Reference Sequence Q99ZW2. In some embodiments, the dCas9 protein comprises a mutation at position H840 as numbered in Uniprot Reference Sequence: Q99ZW2. In some embodiments, the dCas9 protein comprises a D10A mutation as numbered in Uniprot Reference Sequence: Q99ZW2. In some embodiments, the dCas9 protein comprises a H840A mutation as numbered in Uniprot Reference Sequence: Q99ZW2. In some embodiments, the dCas9 protein comprises a D10A and a H840A mutation as numbered in Uniprot Reference Sequence: Q99ZW2. In some embodiments, a nuclease inactive Cas9 comprises the amino acid sequence of dCas9 (D10A and H840A) (SEQ ID NO.: 3).

[0100] Additional suitable mutations that inactivate Cas9 will be apparent to those of skill in the art based on this disclosure and knowledge in the field and are within the scope of this disclosure. Such additional exemplary suitable nuclease-inactive Cas9 domains include, but are not limited to, D839A, N863A, and/or K603R. Cas9, dCas9, or Cas9 variant also encompasses Cas9, dCas9, or Cas9 variants from any organism. Also appreciated is that dCas9, Cas9 nickase, or other appropriate Cas9 variants from any organisms may be used in accordance with the present disclosure.

[0101] In some embodiments, an epigenetic editor comprises a high fidelity Cas9 domain. For example, high fidelity Cas9 domains comprising one or more mutations that decrease electrostatic interactions between the Cas9 domain and the sugar-phosphate backbone of DNA may be incorporated in an epigenetic editor to confer increased target binding specificity as compared to a corresponding wild-type Cas9 domain. Without wishing to be bound by any particular theory, high fidelity Cas9 domains that have decreased electrostatic interactions with the sugar-phosphate backbone of DNA may have less off-target effects. In some embodiments, the Cas9 domain comprises one or more mutations that decreases the association between the Cas9 domain and the sugar-phosphate backbone of DNA. In some embodiments, a Cas9 domain comprises one or more mutations that decreases the association between the Cas9 domain and the sugar-phosphate backbone of DNA by at least 1%, at least 2%, at least 3%, at least 4%, at least 5%, at least 10%, at least 15%, at least 20%, at least 25%, at least 30%, at least 35%, at least 40%, at least 45%, at least 50%, at least 55%, at least 60%, at least 65%, at least 70%, or more. In some embodiments, a high fidelity Cas9 domain comprises one or more of N497X, R661X, Q695X, and/or Q926X mutation as numbered in the wild type Cas9 amino acid sequence Uniprot Reference Sequence: Q99ZW2 or a corresponding amino acid in another Cas9, wherein X is any amino acid. In some embodiments, a high fidelity Cas9 domain comprises one or more of N497A, R661A, Q695A, and/or Q926A mutation of the amino acid sequence provided in the wild type Cas9 sequence, or a corresponding mutation as numbered in the wild type Cas9 amino acid sequence Uniprot Reference Sequence: Q99ZW2 or a corresponding amino acid in another Cas9. It should be appreciated that any of the epigenetic editors provided herein, for example, any of the epigenetic activators or repressors provided herein, may be converted into high fidelity epigenetic editors by modifying the Cas9 domain as described. In preferred embodiments, the high fidelity Cas9 domain is a nuclease inactive Cas9 domain.

[0102] In some embodiments, a DNA binding domain in an epigenetic editor is a CRISPR protein that recognizes a protospacer adjacent motif (PAM) sequence in a target gene. A CRISPR protein may recognize a naturally occurring or canonical PAM sequence or may have altered PAM specificities. Cas9 domains that bind to non-canonical PAM sequences have been described in the art and would be apparent to the skilled artisan. For example, Cas9 domains that bind non-canonical PAM sequences have been described in Kleinstiver, B. P., et al., “Engineered CRISPR-Cas9 nucleases with altered PAM specificities” Nature 523, 481-485 (2015); and Kleinstiver, B. P., et ah, “Broadening the targeting range of Staphylococcus aureus CRISPR-Cas9 by modifying PAM recognition” Nature Biotechnology 33, 1293-1298 (2015); the entire contents of each are hereby incorporated by reference.

[0103] In some embodiments, the Cas9 domain is a Cas9 domain from S. pyogenes (SpCas9). In some embodiments, a SpCas9 recognizes a canonical NGG PAM sequence where the “N” in “NGG” is adenine (A), thymine (T), guanine (G), or cytosine (C), and the G is guanine. In some embodiments, an epigenetic editor or fusion protein provided herein contains a SpCas9 domain that is capable of binding a nucleotide sequence that does not contain a canonical (e.g., NGG) PAM sequence. In some embodiments, the SpCas9 domain, the nuclease inactive SpCas9 domain, or the SpCas9 nickase domain can bind to a nucleic acid sequence having a NGG, a NGA, or a NGCG PAM sequence. In some embodiments, the SpCas9 domain comprises one or more of a D1135X, a R1335X, and a T1337X mutation as numbered in the wild type SpCas9 amino acid sequence or a corresponding mutation in another SpCas9 protein, wherein X is any amino acid. In some embodiments, the SpCas9 domain comprises one or more of a D1135E, R1335Q, and T1337R mutation as numbered in the wild type SpCas9 amino acid sequence or a corresponding mutation in another SpCas9 protein. In some embodiments, the SpCas9 domain comprises one or more of a D1 134V, a R1334Q, and a T1336R mutation as numbered in the wild type Cas9 amino acid sequence, or a corresponding mutation thereof. In some embodiments, the SpCas9 domain comprises a D1135V, a R1335Q, and a T1337R mutation as numbered in the wild type SpCas9 amino acid sequence or a corresponding mutation in another SpCas9 protein. In some embodiments, the SpCas9 domain comprises one or more of a D1135X, a G1218X, a R1335X, and a T1337X mutation as numbered in the wild type SpCas9 amino acid sequence or a corresponding mutation in another SpCas9 protein, wherein X is any amino acid. In some embodiments, the SpCas9 domain comprises one or more of a D1135V, a G1218R, a R1335Q, and a T1337R mutation as numbered in the wild type SpCas9 amino acid sequence or a corresponding mutation in another SpCas9 protein. In some embodiments, the SpCas9 domain comprises a D1135V, a G1218R, a R1335Q, and a T1337R mutation as numbered in the wild type SpCas9 amino acid sequence or a corresponding mutation in another SpCas9 protein.

[0104] In some embodiments, the Cas9 domain is a modified SpCas9 domain having specificity for a 5′-NGCG-3′ PAM sequence, where N is any one of nucleotides A, G, C, or T. In some embodiments, the modified SpCas9 domain having specificity for a 5′-NGCG-3′ PAM sequence comprises a D1135V, a G1218R, a R1335E, and a T1337R mutation as numbered in the wild type SpCas9 amino acid sequence or a corresponding mutation in another SpCas9 protein (the “VRER” SpCas9). In some embodiments, the VRER SpCas9 further comprises one or more mutations that reduces or abolishes its nuclease activity. For example, the SpCas9 may further comprise a D10A and a H840A mutation and is a nuclease inactive SpCas9. Amino acid sequence of an exemplary nuclease inactive VRER SpCas9 is provided in SEQ ID NO.: 4.

[0105] In some embodiments, the Cas9 domain is a modified SpCas9 domain having specificity for a 5′-NGAG-3′ PAM sequence, where N is any one of nucleotides A, G, C, or T. In some embodiments, the modified SpCas9 domain having specificity for a 5′-NGAG-3′ PAM sequence comprises a D1135E, a R1335Q, and a T1337R mutation as numbered in the wild type SpCas9 amino acid sequence or a corresponding mutation in another SpCas9 protein (the “EQR” SpCas9). In some embodiments, the EQR SpCas9 further comprises one or more mutations that reduces or abolishes its nuclease activity. For example, the SpCas9 may further comprise a D10A and a H840A mutation and is a nuclease inactive SpCas9.

[0106] Amino acid sequence of an exemplary nuclease inactive EQR SpCas9 is provided in SEQ ID NO.: 5.

[0107] In some embodiments, the Cas9 domain is a modified SpCas9 domain having specificity for a 5′-NGAN-3′ or a 5-NGNG-3′ PAM sequence, where N is any one of nucleotides A, G, C, or T. In some embodiments, the modified SpCas9 domain having specificity for a 5′-NGAN-3′ or a 5-NGNG-3′ PAM sequence comprises a D1135V, a R1335Q, and a T1337R mutation as numbered in the wild type SpCas9 amino acid sequence or a corresponding mutation in another SpCas9 protein (the “VQR” SpCas9). In some embodiments, the VQR SpCas9 further comprises one or more mutations that reduces or abolishes its nuclease activity. For example, the SpCas9 may further comprise a D10A and a H840A mutation and is a nuclease inactive SpCas9.

[0108] Amino acid sequence of an exemplary nuclease inactive VQR SpCas9 is provided in SEQ ID NO.: 6.

[0109] In some embodiments, the Cas9 domain is a modified SpCas9 domain having specificity for a 5′-NGN-3′ PAM sequence, where N is any one of nucleotides A, G, C, or T. In some embodiments, the modified SpCas9 domain having specificity for a 5′-NGN-3′ PAM sequence comprises a D1135L, a S1136W, a G1218K, a E1219Q, a R1335Q, a T1337R, a D1135V, a R1335Q, and a T1337R mutation as numbered in the wild type SpCas9 amino acid sequence or a corresponding mutation in another SpCas9 protein (the “SpGCas9”). In some embodiments, the SpG Cas9 further comprises one or more mutations that reduces or abolishes its nuclease activity. For example, the SpGCas9 may further comprise a D10A and a H840A mutation and is a nuclease inactive SpGCas9.

[0110] Amino acid sequence of an exemplary nuclease inactive SpG Cas9 is provided in SEQ ID NO.: 7.

[0111] In some embodiments, the Cas9 domain is a modified SpCas9 domain having specificity for a 5′-NRN-3′ or a 5′-NYN-3′ PAM sequence, where N is any one of nucleotides A, G, C, or T, where R is nucleotide A or G, and where Y is nucleotide C or T. In some embodiments, the modified SpCas9 domain having specificity for a 5′-NRN-3′ or a 5′-NYN-3′ PAM sequence comprises a A61R, a L1111R, a D1135L, a S1136W, a G1218K, a E1219Q, a N1317R, a A1322R, a R1333P, a R1335Q, and a T1337R mutation as numbered in the wild type SpCas9 amino acid sequence or a corresponding mutation in another SpCas9 protein (the “SpRYCas9”). In some embodiments, the SpRY Cas9 further comprises one or more mutations that reduces or abolishes its nuclease activity. For example, the SpCas9 may further comprise a D10A and a H840A mutation and is a nuclease inactive SpRYCas9.

[0112] Amino acid sequence of an exemplary nuclease inactive SpRY Cas9 is provided in SEQ ID NO.: 8.

[0113] In some embodiments, the Cas9 domain is a Cas9 domain from Staphylococcus aureus (SaCas9). In some embodiments, the SaCas9 domain is a nuclease inactive SaCas9 (dSacas9). In some embodiments, the SaCas9 comprises a N579A mutation as numbered in the wild type SaCas9 sequence or a corresponding mutation in another SaCas9 protein. In some embodiments, the SaCas9 comprises a D10A mutation as numbered in the wild type SaCas9 sequence or a corresponding mutation in another SaCas9 protein. In some embodiments, the dSaCas9 comprises a D10A mutation and a N579A mutation as numbered in the wild type SaCas9 sequence or a corresponding mutation in another SaCas9 protein.

[0114] An exemplary wild type SaCas9 protein is provided in SEQ ID NO.: 9.

[0115] In some embodiments, the SaCas9 domain, the nuclease inactive SaCas9 domain, or the SaCas9 nickase domain can bind to a nucleic acid sequence having a non-canonical PAM. In some embodiments, the SaCas9 domain, the SaCas9d domain, or the SaCas9n domain can bind to a nucleic acid sequence having a NNGRRT PAM sequence, where N=A, T, C, or G, and R=A or G. In some embodiments, the SaCas9 domain comprises one or more of a E781K, a N967K, and a R1014H mutation as numbered in the wild type SaCas9 sequence or a corresponding mutation in another SaCas9 protein (the “KKH” SaCas9). In some embodiments, the SaCas9 domain comprises a E781K, a N967K, or a R1014H mutation as numbered in the wild type SaCas9 sequence or a corresponding mutation in another SaCas9 protein. In some embodiments, the SaCas9 domain, the SaCas9d domain, or the SaCas9n domain can bind to a nucleic acid sequence having a non-canonical PAM. In some embodiments, the SaCas9 domain or the nuclease inactive SaCas9d domain can bind to a nucleic acid sequence having a NNGRRT PAM sequence. In some embodiments, the SaCas9 domain comprises one or more of a E781K, a N967K, and a R1014H mutation, or one or more corresponding mutation in any of the amino acid sequences provided herein. In some embodiments, the SaCas9 domain comprises a E781K, a N967K, or a R1014H mutation, or corresponding mutations in any of the amino acid sequences provided herein. In some embodiments, the KKH SaCas9 further comprises one or more mutations that reduces or abolishes its nuclease activity. For example, the KKHSaCas9 may further comprise a D10A and a N579A mutation and is a nuclease inactive KKH SaCas9. Amino acid sequence of an exemplary nuclease inactive KKH dSaCas9 is provided in SEQ ID NO.: 10

[0116] In some embodiments, the Cas9 domain is a Cas9 domain from Neisseria meningitidis (NmeCas9). In some embodiments, the NmeCas9 domain is a nuclease inactive NmeCas9 (dNmeCas9). An NmeCas9 may have specificity for a 5′-NNNGATT-3′ PAM, where N is any one of nucleotides A, G, C, or T. In some embodiments, the NmeCas9 comprises a D16A mutation, or a corresponding mutation in any of the amino acid sequences as numbered in the wild type NmeCas9 sequence. In some embodiments, the NmeCas9 comprises a H588A mutation as numbered in the wild type NmeCas9 sequence or a corresponding mutation in another NmeCas9 protein. In some embodiments, a dNmeCas9 comprises a D16A and a H588A mutation.

[0117] Amino acid sequence of an exemplary dNmeCas9 protein is provided in SEQ ID NO.: 11.

[0118] In some embodiments, the Cas9 domain is a Cas9 domain from Campylobacter jejuni (CjCas9). In some embodiments, the CjCas9 domain is a nuclease inactive CjCas9 (dCjCas9). A Cj Cas9 may have specificity for a 5′-NNNVRYM-3′ PAM, where N is any one of nucleotides A, G, C, or T, V is nucleotide A, C, or G, R is nucleotide A or G, Y is nucleotide C or T, and M is nucleotide A or C. In some embodiments, the CjCas9 comprises a D8A mutation, or a corresponding mutation in any of the amino acid sequences as numbered in the wild type CjCas9 sequence. In some embodiments, the CjCas9 comprises a H559A mutation as numbered in the wild type CjCas9 sequence or a corresponding mutation in another CjCas9 protein. In some embodiments, a dCjCas9 comprises a D16A and a H588A mutation.

[0119] Amino acid sequence of an exemplary dCjCas9 protein is provided in SEQ ID NO.: 12.

[0120] In some embodiments, the Cas9 domain is a Cas9 domain from Streptococcus thermophilus (StCas9). In some embodiments, the StCas9 is encoded by St CRISPRI loci of the Streptococcus thermophilus (St1Cas9). In some embodiments, the St1Cas9 domain is a nuclease inactive St1Cas9 (dSt1Cas9). An St1Cas9 may have specificity for a 5′-NNAGAAW-3′ PAM, where N is any one of nucleotides A, G, C, or T, and W is nucleotide A or T. In some embodiments, the St1Cas9 comprises a D10A mutation, or a corresponding mutation in any of the amino acid sequences as numbered in the wild type St1Cas9 sequence. In some embodiments, the St1Cas9 comprises a H600A mutation as numbered in the wild type St1Cas9 sequence or a corresponding mutation in another St1Cas9 protein. In some embodiments, a St1Cas9d comprises a D10A and a H600A mutation.

[0121] In some embodiments, the StCas9 is encoded by St CRISPR3 loci of the Streptococcus thermophilus (St3Cas9). In some embodiments, the St3Cas9 domain is a nuclease inactive St3Cas9 (dSt3Cas9). An St3Cas9 may have specificity for a 5′-NGGNG-3′ PAM, where N is any one of nucleotides A, G, C, or T. In some embodiments, the St3Cas9 comprises a D10A mutation, or a corresponding mutation in any of the amino acid sequences as numbered in the wild type St3Cas9 sequence. In some embodiments, the St3Cas9 comprises a N870A mutation as numbered in the wild type St3Cas9 sequence or a corresponding mutation in another St3Cas9 protein. In some embodiments, a dSt3Cas9 comprises a D10A and a N870A mutation.

[0122] Amino acid sequence of an exemplary dStlCas9 protein is provided in SEQ ID NO.: 13.

[0123] Amino acid sequence of an exemplary dSt3Cas9 protein is provided in SEQ ID NO.: 14.

[0124] In some embodiments, the Cas9 domain of any of the fusion proteins provided herein comprises an amino acid sequence that is at least 60%, at least 65%, at least 70%, at least 75%, at least 80%, at least 85%, at least 90%, at least 95%, at least 96%, at least 97%, at least 98%, at least 99%, or at least 99.5% identical to any one of the Cas9 sequences provided herein.

[0125] In some embodiments, an epigenetic editor provided herein comprises a Cpf1 (or Cas12a) protein domain. For example, an epigenetic editor can comprise a nuclease inactive Cpf1 protein or a variant thereof. The Cpf1 protein has a RuvC-like endonuclease domain that is similar to the RuvC domain of Cas9 but does not have a HNH endonuclease domain, and the N-terminal of Cpf1 does not have the alpha-helical recognition lobe of Cas9. In some embodiments, the Cpf1 comprises one or more mutations corresponding to D917A, E1006A, or D1255A as numbered in the Francisella novicida Cpf1 protein (FnCpf1). A FnCpf1 may have specificity for a 5′-TTN-3′ PAM sequence, where N is any one of nucleotides A, T, G, or C. In some embodiments, the Cpf1 protein has reduced nuclease activity. In some embodiments, the nuclease activity of the Cpf1 protein is abolished (dCpf1). In some embodiments, the dCpf1 protein comprises mutations corresponding to D917A, E1006A, D1255A, D917A/E1006A, D917A/D1255A, E1006A/D1255A, or D917A/E1006A/D1255A or a corresponding mutation in any of the Cpf1 amino acid sequences as numbered in the wild type FnCpf1 sequence provided herein. In some embodiments, the dCpf1 comprises a D917A mutation, or a corresponding mutation in any of the Cpf1 amino acid sequences as numbered in the wild type FnCpf1 sequence.

[0126] In some embodiments, the Cpf1 protein comprises an amino acid sequence that is at least 85%, at least 90%, at least 91%, at least 92%, at least 93%, at least 94%, at least 95%, at least 96%, at least 97%, at least 98%, at least 99%, or at ease 99.5% identical to the FnCpf1 sequence provided herein. It should be appreciated that Cpf1 from other bacterial species may also be used in accordance with the present disclosure.

[0127] An exemplary wild type Francisella novicida Cpf1 amino acid sequence is provided in SEQ ID NO.: 15.

[0128] Amino acid sequence of an exemplary nuclease inactive FnCpf1 protein is provided in SEQ ID NO.: 16.

[0129] In some embodiments, the Cpf1 is a Cpf1 protein from Lachnospiraceae bacterium (LbCpf1). A LbCpf1 may have specificity for a 5′-TTTV-3′ PAM sequence, where V is any one of nucleotides A, G, or C. In some embodiments, the LbCpf1 protein has reduced nuclease activity. In some embodiments, the nuclease activity of the LbCpf1 protein is abolished (dLbCpf1). In some embodiments, the dLbCpf1 protein comprises mutations corresponding to D832A or a corresponding mutation in any of the Cpf1 amino acid sequences as numbered in the wild type LbCpf1 sequence provided herein.

[0130] Amino acid sequence of an exemplary nuclease inactive dLbCpf1 protein is provided in SEQ ID NO.: 17.

[0131] In some embodiments, the Cpf1 is a Cpf1 protein from Acidaminococcus sp. (AsCpf1). A AsCpf1 may have specificity for a 5′-TTTV-3′ PAM sequence, where V is any one of nucleotides A, G, or C. In some embodiments, the AsCpf1 protein has reduced nuclease activity. In some embodiments, the nuclease activity of the AsCpf1 protein is abolished (dAsCpf1. In some embodiments, the dLbCpf1 protein comprises mutations corresponding to D908A or a corresponding mutation in any of the Cpf1 amino acid sequences as numbered in the wild type AsCpf1 sequence provided herein. In some embodiments, the dAsCpf1 or AsCpf1 further comprises mutations that improve targeting and editing efficiency. For example, an AsCpf1 may comprise mutations E174R, S542R, and K548R (“enAsCpf1”) or corresponding mutations in any of the Cpf1 amino acid sequences as numbered in the wild type AsCpf1 sequence provided herein.

[0132] Amino acid sequence of an exemplary nuclease inactive AsCpf1 protein is provided in SEQ ID NO.: 18.

[0133] Amino acid sequence of an exemplary nuclease inactive enAsCpf1 protein is provided in SEQ ID NO.: 19.

[0134] In some embodiments, the dAsCpf1 or AsCpf1 protein further comprises mutations that improve fidelity of target recognition of the protein. For example, an AsCpf1 may comprise mutations E174R, N282A, S542R, and K548R (“HFAsCpf1”) or corresponding mutations in any of the Cpf1 amino acid sequences as numbered in the wild type AsCpf1 sequence provided herein.

[0135] Amino acid sequence of an exemplary nuclease inactive HFAsCpf1 protein is provided in SEQ ID NO.: 20.

[0136] In some embodiments, the dAsCpf1 or AsCpf1 protein further comprises mutations that result in altered PAM specificity of the protein. In some embodiments, an AsCpf1 comprising mutations S542R, K548V, and N552R (“RVRAsCpf1”) or corresponding mutations in any of the Cpf1 amino acid sequences as numbered in the wild type AsCpf1 sequence provided herein may have specificity for a 5′-TATV-3′ PAM, where V is any one of nucleotides A, C, or G. In some embodiments, an AsCpf1 comprising mutations S542R and K607R (“RRAsCpf1”) or corresponding mutations in any of the Cpf1 amino acid sequences as numbered in the wild type AsCpf1 sequence provided herein may have specificity for a 5′-TYCV-3′ PAM, where Y is any one of nucleotides C or T and V is any one of nucleotide A, C, or G.

[0137] Amino acid sequence of an exemplary nuclease inactive RVRAsCpf1 protein is provided in SEQ ID NO.: 21.

[0138] Amino acid sequence of an exemplary nuclease inactive RRAsCpf1 protein is provided in SEQ ID NO.: 22.

[0139] In some embodiments, an epigenetic editor provided herein comprises a Cas protein domain other than Cas9. In some embodiments, the Cas9 protein comprises an inactivated nuclease domain. In some embodiments, an epigenetic editor comprises a Cas12a, a Cas12b, a Cas12c, a Cas12d, a Cas12e, a Cas12h, or a Cas12i domain. In some embodiments, the Cas9 protein is a RNA nuclease or an inactivated RNA nuclease. In some embodiments, an epigenetic editor comprises a Cas12g, a Cas13a, a Cas13b, a Cas13c, or a Cas13d domain. In some embodiments, an epigenetic editor comprises an Argonaut protein domain.

[0140] A CRISPR/Cas system or a Cas protein in an epigenetic editor system provided herein may comprise Class 1 or Class 2 Cas proteins. The Class 1 or Class 2 proteins used in an epigenetic editor may be inactivated in its nuclease activity. In some embodiments, an epigenetic editor comprises a Cas protein derived from a Type II, Type IIA, Type IIB, Type IIC, Type V, or Type VI Cas nuclease. In some embodiments, an epigenetic editor comprises a Cas protein derived from a Class 2 Cas nucleases derived from Cas1, Cas1B, Cas2, Cas3, Cas4, Cas5, Cas6, Cas7, Cas8, Cas10, Cas14a, Cas14b, Cas14c, CasX, CasY, CasPhi, C2c4, C2c8, C2c9, C2c10, Csy1, Csy2, Csy3, Cse1, Cse2, Csc1, Csc2, Csa5, Csn2, Csm2, Csm3, Csm4, Csm5, Csm6, Cmr1, Cmr3, Cmr4, Cmr5, Cmr6, Csb1, Csb2, Csb3, Csx17, Csx14, Csx10, Csx16, CsaX, Csx3, Csx1, Csx1S, Csf1, Csf2, CsO, Csf4, or homologues or modified versions thereof. In some embodiments, a Cas protein in an epigenetic editor is a nuclease inactivated Cas protein.

[0141] In some embodiments, the epigenetic editor comprises a CasX (Cas12e) protein. A CasX protein may have specificity for a 5′-TTCN-3′ PAM sequence, where N is any one of nucleotides A, G, T, or C. In some embodiments, the CasX protein has reduced or abolished nuclease activity (dCasX), In some embodiments, the dCasX protein comprises one or more of E672X, E769X, D935X amino acid substitutions as compared to the CasX reference sequence provided below, where X is any amino acid other than the wild type amino acid. In some embodiments, the dCasX protein comprises one or more of E672A, E769A, D935A amino acid substitutions as compared to the CasX reference sequence provided below. In some embodiments, the CasX protein is a truncated CasX protein as compared to the wild type. In some embodiments, the CasX protein lacks a target strand loading domain (TSLD). CasX protein and sequences as described in U.S. Pat. No. 10,570,415 and PCT application publication No.s WO2020023529, WO2020041456 are incorporated herein in the entirety.

[0142] An exemplary CasX amino acid sequence is provided in SEQ ID NO.: 23.

[0143] An exemplary dCasX amino acid sequence is provided in SEQ ID NO.: 24.

[0144] In some embodiments, the epigenetic editor comprises a CasY (Cas12d) protein. A CasY protein may have specificity for a 5′-TA-3′ PAM sequence. In some embodiments, the CasY protein has reduced or abolished nuclease activity (dCasY). In some embodiments, the dCasY protein comprises one or more of D828X, E914X, D1074X amino acid substitutions as compared to the CasY reference sequence provided below, where X is any amino acid other than the wild type amino acid. In some embodiments, the dCasY protein comprises one or more of D828A, E914A, D1074A amino acid substitutions as compared to the CasY reference sequence provided below. CasY protein and sequences as described in US Patent Application Publication No.s US20200255858 and US20190300908 are incorporated herein in the entirety.

[0145] An exemplary CasY amino acid sequence is provided in SEQ ID NO.: 25.

[0146] In some embodiments, the epigenetic editor comprises a Casφ (CasPhi) protein. A Casφ protein may have specificity for a 5′-TTN-3′ PAM sequence, wherein N is any one of nucleotides A, T, G, or C. In some embodiments, the Casφ protein has reduced or abolished nuclease activity (dCasφ). In some embodiments, a dCasφ protein comprises a D394A mutation or a corresponding mutation in any of the Casφ amino acid sequences as numbered in the wild type Casφ sequence provided herein.

[0147] Cas φ protein and sequences as described in Pausch et al., CRISPR-Cas φ from huge phages is a hypercompact genome editor, Science 369, 333-337 (2020), which is incorporated herein in the entirety.

[0148] An exemplary wild type Casφ (CasPhi) amino acid sequence is provided in SEQ ID NO.: 26.

[0149] An exemplary dCasφ (dCasPhi) amino acid sequence is provided in SEQ ID NO.: 27.

[0150] In some embodiments, the epigenetic editor comprises a Cas12f1 (Cas14a) protein as in SEQ ID NO.: 28. In some embodiments, the epigenetic editor comprises a Cas12f2 (Cas14b) protein as in SEQ ID NO.: 29. In some embodiments, the epigenetic editor comprises a Cas12f3 (Cas14c) protein as in SEQ ID NO.: 30. In some embodiments, the epigenetic editor comprises a C2c8 protein as in SEQ ID NO.: 31.

[0151] In some embodiments, the Cas protein is a circular permutant Cas protein. For example, an epigenetic editor may comprise a circular permutant Cas9 as described in Oakes et al., Cell 176, 254-267 (2019), incorporated herein in its entirety. As used herein, the term “circular permutant” refers to a variant polypeptide (e.g., of a subject Cas protein) in which one section of the primary amino acid sequence has been moved to a different position within the primary amino acid sequence of the polypeptide, but where the local order of amino acids has not been changed, and where the three dimensional architecture of the protein is conserved. For example, a circular permutant of a wild type 1000 amino acid polypeptide may have an N-terminal residue of residue number 500 (relative to the wild type protein), where residues 1-499 of the wild type protein are added the C-terminus. Such a circular permutant, relative to the wild type protein sequence would have, from N-terminus to C-terminus, amino acid numbers 500-1000 followed by 1-499, resulting in a circular permutant protein with amino acid 499 being the C-terminal residue. Thus, such an example circular permutant would have the same total number of amino acids as the wild type reference protein, and the amino acids would be in the same order locally in specific regions of the circular permutant, but the overall primary amino acid sequence is changed.

[0152] In some embodiments, an epigenetic editor comprises a circular permuted Cas protein, e.g. a circular permuted Cas9 protein. In some embodiments, the epigenetic editor comprises a fusion of a circular permuted Cas protein and an epigenetic effector domain, where the epigenetic effector domain is fused to the circular permuted Cas protein to a N-terminus or C-terminus that is different from that of wild type Cas protein.

[0153] In some embodiments, the circular permuted Cas protein comprises a N-terminal end of an N-terminal fragment of a wild type Cas protein fused to a C-terminus of a C-terminal fragment of the wild type Cas protein, hereby generating new N- and C-termini. Without wishing to be bound by any theory, the N-terminus and C-terminus of a wild type Cas protein may be locked in a small region, which may cause steric hinderance when the Cas protein is fused to an effect domain and reduced access to the target DNA sequence. In some embodiments, the epigenetic editor comprising a circular permutant Cas protein has reduced steric incompatibility as compared to an epigenetic editor comprising a wild type Cas protein counterpart. In some embodiments, the epigenetic editor comprising a circular permutant Cas protein has improved effectiveness as compared to an epigenetic editor comprising a wild type Cas protein counterpart. In some embodiments, the epigenetic editor comprising a circular permutant Cas protein has improved epigenetic editing accuracy as compared to an epigenetic editor comprising a wild type Cas protein counterpart. In some embodiments, the epigenetic editor comprising a circular permutant Cas protein has reduced off-target editing effect as compared to an epigenetic editor comprising a wild type Cas protein counterpart.

[0154] In some embodiments, the circular permutant Cas protein is a circular permutant Cas9 protein. In some embodiments, the circular permuted Cas9 protein includes an N-terminal fragment of a wild type Cas9 protein fused to the C-terminus of the Cas9 protein (e.g., in some cases via a linker, e.g., a cleavable linker), where the C-terminal amino acid of the N-terminal fragment (i.e., the C-terminus of the N-terminal fragment) includes an amino acid corresponding to amino acid 182D, 200P, 231G, 271Y, 311E, 1011G, 1017D, 1024K, 10291, 1030G, 1032A, 10421, 1245L, 1249P, 1250E, or 1283A of the wild type Cas9 protein sequence. In some cases, a circular permuted Cas9 protein includes an N-terminal fragment of a wild type Cas9 protein fused to the C-terminus of a C terminal fragment the wild type Cas9 protein (e.g., in some cases via a linker, e.g., a cleavable linker), where the N-terminal fragment includes an amino acid sequence corresponding to amino acids 1-182, 1-200, 1-231, 1-271, 1-311, 1-1011, 1-1017, 1-1024, 1-1029, 1-1030, 1-1032, 1-1042, 1-1245, 1-1249, 1-1250, or 1-1283 of the wild type Cas9 protein. Additional circular permuted Cas9 proteins as described in US Patent Application No. US20190233847 is incorporated herein by reference in its entirety.

### Guide Polynucleotides

[0155] In some embodiments, an epigenetic editor comprises a guide polynucleotide (or guide nucleic acid). For example, an epigenetic editor with a DNA binding domain that includes a CRISPR-Cas protein may also include a guide nucleic acid that is capable of forming a complex with the CRISPR-Cas protein.

[0156] Methods of using guide nucleotide sequence-programmable DNA-binding protein, such as Cas9, for site-specific DNA targeting (e.g., to modify a genome) are known in the art. The guide RNA (gRNA) may guide the programmable DNA binding protein, e.g a Class 2 Cas protein such as a Cas9 to a target sequence on a target nucleic acid molecule, where the gRNA hybridizes with and the programmable DNA binding protein and generates modification at or near the target sequence. In some embodiments, the gRNA and an epigenetic editor fusion protein may form a ribonucleoprotein (RNP), e.g., a CRISPR/Cas complex.

[0157] A guide nucleotide sequence, e.g. a guide RNA sequence, may comprises two parts: 1) a nucleotide sequence that shares homology to a target nucleic acid (e.g., and directs binding of a guide nucleotide sequence-programmable DNA-binding protein to the target); and 2) a nucleotide sequence that binds a nucleic acid guided programmable DNA-binding protein, for example, a CRISPR-Cas protein. The nucleotide sequence in 1) may comprise a spacer sequence that hybridizes with a target sequence. The nucleotide sequence in 2) may be referred to as a scaffold sequence of a guide nucleic acid, a tracrRNA, or an activating region of a guide nucleic acid, and may comprise a stem-loop structure. The scaffold sequences of guide nucleic acids as described in Jinek et al., Science 337:816-821(2012), U.S. Patent Application Publication US20160208288, and U.S. Patent Application Publication US20160200779 are each incorporated herein by reference in its entirety. A guide polynucleotide may be a single molecule or may comprise two separate molecules. For example, parts 1) and 2) as described above may be fused to form one single guide (e.g. a single guide RNA, or sgRNA), or may be two separate molecules. In some embodiments, a guide polynucleotide is a dual polynucleotides connected by a linker. In some embodiments, a guide polynucleotide is a dual polynucleotides connected by a non-nucleic acid linker, for example, a peptide linker or a chemical linker.

[0158] Methods for selecting, designing, and validating gRNAs and targeting sequences (or spacer sequences) are described herein and known to those skilled in the art. Software tools can be used to optimize the gRNAs corresponding to a target nucleic acid sequence, e.g., to minimize total off-target activity across the genome. For example, DNA sequence searching algorithm can be used to identify a target sequence in crRNAs of a gRNA for use with Cas9. Exemplary gRNA design tools, including as described in Bae, et al., Cas-OFFinder: A fast and versatile algorithm that searches for potential off-target sites of Cas9 RNA-guided endonucleases. Bioinformatics 30, 1473-1475 (2014)), is herein incorporated in its entirety.

[0159] A guide polynucleotide may be of variant lengths. In some embodiments, the length of the spacer or targeting sequence depends on the CRISPR/Cas component of the epigenetic editor system and components used. For example, different Cas proteins from different bacterial species have varying optimal targeting sequence lengths. Accordingly, the spacer sequence may comprise 5, 6, 7, 8, 9, 10, 11, 12, 13, 14, 15, 16, 17, 18, 19, 20, 21, 22, 23, 24, 25, 26, 27, 28, 29, 30, 31, 32, 33, 34, 35, 36, 37, 38, 39, 40, 41, 42, 43, 44, 45, 46, 47, 48, 49, 50, or more than 50 nucleotides in length. In some embodiments, the spacer comprised 18-24 nucleotides in length. In some embodiments, the spacer comprises 19-21 nucleotides in length. In some embodiments, the spacer sequence comprises 20 nucleotides in length. In some embodiments, a guide nucleic acid (e.g., guide RNA) is from 15-100 nucleotides long and comprises a sequence of at least 10 contiguous nucleotides that is complementary to a target sequence. In some embodiments, the guide RNA is 15, 16, 17, 18, 19, 20, 21, 22, 23, 24, 25, 26, 27, 28, 29, 30, 31, 32, 33, 34, 35, 36, 37, 38, 39, 40, 41, 42, 43, 44, 45, 46, 47, 48, 49, or 50 nucleotides long. In some embodiments, the guide RNA comprises a sequence of 15, 16, 17, 18, 19, 20, 21, 22, 23, 24, 25, 26, 27, 28, 29, 30, 31, 32, 33, 34, 35, 36, 37, 38, 39, 40, 41, 42, 43, 44, 45, 46, 47, 48, 49, or 50 contiguous nucleotides that is complementary to a target sequence. In some embodiments, the target sequence is a DNA sequence. In some embodiments, the degree of complementarity between the targeting sequence of the gRNA and the target sequence on the target nucleic acid molecule is at least about 60%, 65%, 70%, 75%, 80%, 85%, 90%, 95%, 97%, 98%, 99%, or 100%. In some embodiments, the targeting sequence of the gRNA and the target sequence on the target nucleic acid molecule may be 100% complementary. In other embodiments, the targeting sequence of the gRNA and the target sequence on the target nucleic acid molecule may contain at least one mismatch. For example, the targeting sequence of the gRNA and the target sequence on the target nucleic acid molecule may contain 1, 2, 3, 4, 5, 6, 7, 8, 9, or 10 mismatches. In some embodiments, the target sequence is a sequence in the genome of a mammal. In some embodiments, the target sequence is a sequence in the genome of a human. In some embodiments, the 3′ end of the target sequence is immediately adjacent to a canonical PAM sequence (NGG). In some embodiments, the guide nucleic acid (e.g., guide RNA) is complementary to a sequence associated with a disease or disorder.

[0160] In some embodiments, a guide RNA is truncated. The truncation can comprise any number of nucleotide deletions. For example, the truncation can comprise 1, 2, 3, 4, 5, 10, 15, 20, 25, 30, 40, 50 or more nucleotides. In some embodiments, a guide polynucleotide comprises RNA. In some embodiments, a guide polynucleotide comprises DNA. In some embodiments, a guide polynucleotide comprises a mixture of DNA and RNA.

[0161] A guide polynucleotide may be modified. The modifications can comprise chemical alterations, synthetic modifications, nucleotide additions, and/or nucleotide subtractions. Modified nucleosides or nucleotides can be present in a gRNA. For example, a gRNA can comprise one or more non-naturally and/or naturally occurring components or configurations that are used instead of or in addition to the canonical A, G, C, and U residues. A modified RNA can include one or more of an alteration or a replacement, of one or both of the non-linking phosphate oxygens and/or of one or more of the linking phosphate oxygens in the phosphodiester backbone linkage, an alterations of the ribose sugar, e.g., of the 2′ hydroxyl on the ribose sugar (an exemplary sugar modification), an alteration of the phosphate moiety, a modification or replacement of a naturally occurring nucleobase, replacement or modification of the ribose-phosphate backbone, a modification of the 3′ end or 5′ end of the oligonucleotide, or replacement of a terminal phosphate group or conjugation of a moiety, cap, or linker, or any combination thereof.

[0162] In some embodiments, the ribose group (or sugar) may be modified. In some embodiments, modified ribose group may control oligonucleotide binding affinity for complementary strands, duplex formation, or interaction with nucleases. Examples of chemical modifications to the ribose group include, but are not limited to, 2′-O-methyl (2′-OMe), 2′-fluoro (2′-F), 2′-deoxy, 2′-O-(2-methoxyethyl) (2′-MOE), 2′-NH2, 2′-O-Allyl, 2′-O-Ethylamine, 2′-O-Cyanoethyl, 2′-O-Acetalester, or a bicyclic nucleotide such as locked nucleic acid (LNA), 2′-(5-constrained ethyl (S-cEt)), constrained MOE, or 2′-0,4′-C-aminomethylene bridged nucleic acid (2′,4′-BNANC). In some embodiments, 2′-O-methyl modification can increase binding affinity of oligonucleotides. In some embodiments, 2′-O-methyl modification can enhance nuclease stability of oligonucleotides. In some embodiments, 2′-fluoro modification can increase oligonucleotide binding affinity and nuclease stability.

[0163] In some embodiments, the phosphate group may be chemically modified. Examples of chemical modifications to the phosphate group includes, but are not limited to, a phosphorothioate (PS), phosphonoacetate (PACE), thiophosphonoacetate (thioPACE), amide, triazole, phosphonate, or phosphotriester modification. In some embodiments, PS linkage can refer to a bond where a sulfur is substituted for one nonbridging phosphate oxygen in a phosphodiester linkage, e.g., between nucleotides. An “s” may be used to depict a PS modification in gRNA sequences. In some embodiments, a gRNA or an sgRNA may comprise a phosphorothioate (PS) linkage at a 5′ end or at a 3′ end. In some embodiments, a gRNA or an sgRNA may comprise a phosphorothioate (PS) linkage at a 5′ end. In some embodiments, a gRNA or an sgRNA may comprise a phosphorothioate (PS) linkage at a 3′ end. In some embodiments, a gRNA or an sgRNA may comprise a phosphorothioate (PS) linkage at a 5′ end and at a 3′ end. In some embodiments, a gRNA or an sgRNA may comprise one, two, or three, or more than three phosphorothioate linkages at the 5′ end or at the 3′ end. In some embodiments, a gRNA or an sgRNA may comprise three phosphorothioate (PS) linkages at the 5′ end or at the 3′ end. In some embodiments, a gRNA or an sgRNA may comprise three phosphorothioate linkages at the 3′ end. In some embodiments, a gRNA or an sgRNA may comprise two and no more than two (i.e., only two) contiguous phosphorothioate (PS) linkages at the 5′ end or at the 3′ end. In some embodiments, a gRNA or an sgRNA may comprise three contiguous phosphorothioate (PS) linkages at the 5′ end or at the 3′ end. In some embodiments, a gRNA or an sgRNA may comprise the sequence 5′-UsUsU-3′ at the 3′end or at the 5′ end, wherein U indicates a uridine and wherein s indicates a phosphorothioate (PS) linkage. In some embodiments, the nucleobase may be chemically modified. Examples of chemical modifications to the nucleobase include, but are not limited to, 2-thiouridine, 4-thiouridine, N6-methyladenosine, pseudouridine, 2,6-diaminopurine, inosine, thymidine, 5-methylcytosine, 5-substituted pyrimidine, isoguanine, isocytosine, or halogenated aromatic groups. Chemical modifications can be made at a part of a guide polynucleotide or the entire guide polynucleotide. In some embodiments, a total of 1, 2, 3, 4, 5, 6, 7, 8, 9, 10, 11, 12, 13, 14, 15, 16, 17, 18, 19, 20, 21, 22, 23, 24, or 25 base pairs of a guide RNA are chemically modified. In some embodiments, a total of 1, 2, 3, 4, 5, 6, 7, 8, 9, 10, 11, 12, 13, 14, 15, 16, 17, 18, 19, 20, 21, 22, 23, 24, 25, 26, 27, 28, 29, 30, 31, 32, 33, 34, 35, 36, 37, 38, 39, 40, 41, 42, 43, 44, 45, 46, 47, 48, 49, or 50 base pairs of a guide RNA are chemically modified. In some embodiments, a total of 50, 51, 52, 53, 54, 55, 56, 57, 58, 59, 60, 61, 62, 63, 64, 65, 66, 67, 68, 69, 70, 71, 72, 73, 74, 75, 76, 77, 78, 79, 80, 81, 82, 83, 84, 85, 86, 87, 88, 89, 90, 91, 92, 93, 94, 95, 96, 97, 98, 99, 100, 101, 102, 103, 104, 105, 106, 107, 108, 109, 110, 111, 112, 113, 114, 115, 116, 117, 118, 119, 120, 121, 122, 123, 124, 125, 126, 127, 128, 129, 130, 131, 132, 133, 134, 135, 136, 137, 138, 139, 140, 141, 142, 143, 144, 145, 146, 147, 148, 149, or 150 base pairs of a guide RNA are chemically modified. Chemical modifications can be made in the protospacer region, the tracr RNA, the crRNA, the stem loop, or any combination thereof.

### Zinc Finger Proteins

[0164] In some embodiments, an epigenetic editor described herein comprises a nucleic acid binding domain comprising a zinc finger domain.

[0165] Zinc finger proteins are DNA-binding proteins that contain one or more zinc fingers. In some embodiments, a zinc finger (ZF) comprises a relatively small polypeptide domain comprising approximately 30 amino acids. A zinc finger may comprise an α-helix adjacent an antiparallel β-sheet (known as a ββα-fold) which may co-ordinate with a zinc ion between four Cys and/or His residues, as described further below. In some embodiments, a ZF domain recognizes and binds to a nucleic acid triplet, or an overlapping quadruplet, in a double-stranded DNA target sequence. In certain embodiments, ZFs may also bind RNA and proteins.

[0166] As used herein, the term “zinc finger” (ZF) or “zinc finger motif” (ZF motif) refers to an individual “finger”, which comprises a beta-beta-alpha (ββα)-protein fold stabilized by a zinc ion as described elsewhere herein. In some embodiments, each finger includes approximately 30 amino acids. In some embodiments, ZF proteins or ZF protein domains are protein motifs that contain multiple fingers or finger-like protrusions that make tandem contacts with their target molecule. For example, a ZF finger may bind a triplet or (overlapping) quadruplet nucleotide sequence. Accordingly, a tandem array of ZF fingers may be designed for ZF proteins that do not naturally exist to bind desired targets.

[0167] Zinc finger proteins are widespread in eukaryotic cells. An exemplary motif characterizing one class of these proteins (C2H2 class) is -Cys-(X)2-4-Cys-(X)12-His-(X)3-5His (SEQ ID NO: 1158), where X is any amino acid. A single finger domain may be about 30 amino acids in length. In some embodiments, a single finger comprises an alpha helix containing the two invariant histidine residues co-ordinated through zinc with the two cysteines of a single beta turn.

[0168] In some embodiments, amino acid sequence of a zinc finger protein, e.g. a Zif268 protein may be altered by making amino acid substitutions at the helix positions (e.g., positions—1, 2, 3 and 6 of Zif268) on a zinc finger recognition helix. For example, modified zinc fingers with non-naturally occurring DNA recognition specificity may be generated by phage display and combinatorial libraries with randomized side-chains in either the first or middle finger of a Zif268 and then isolated with an altered Zif268 binding site in which the appropriate DNA sub-site was replaced by an altered DNA triplet.

[0169] In some embodiments, a zinc finger comprises a C2H2 finger. In some embodiments, a zinc finger protein comprises a ZF array that comprises sequential C2H2-ZFs each contacting three or more sequential bases. In some embodiments, Zinc finger protein structures, for example, zinc finger protein Zif268 and its variants bound to DNA show a semi-conserved pattern of interactions, in which typically three amino acids from the alpha-helix of the zinc finger contact three adjacent base pairs in the DNA. Accordingly, in embodiments, zinc finger DNA-binding domains function in a modular manner with a one-to-one interaction between a zinc finger and a three-base-pair tri-nucleotide sequence in a DNA sequence.

[0170] In some embodiments, an epigenetic editor comprises a zinc finger motif comprising of a sequence: N′--(Helix 1)- -(Helix 2)- -(Helix 3)- -(Helix 4)--(Helix 5)- -(Helix 6)- -C′, wherein the (Helix) is a-six contiguous amino acid residue peptide that forms a short alpha helix. In some embodiments, an epigenetic editor comprises a zinc finger motif comprising of a sequence: N′--(Helix 1)- -(Helix 2)- -(Helix 3)- -(Helix 4)--(Helix 5)-- -C′, wherein the (Helix) is a-six contiguous amino acid residue peptide that forms a short alpha helix.

[0171] In some embodiments, two or more zinc fingers are linked together in a tandem array to achieve specific recognition and binding of a contiguous DNA sequence. Zinc finger or zinc finger arrays in an epigenetic editor may be naturally occurring, or may be artificially engineered for desired DNA binding specificity. For example, DNA binding characteristics of individual zinc fingers may be engineered by randomizing the amino acids at the alpha-helical positions of the zinc fingers involved in DNA binding and using selection methodologies such as phage display to identify desired variants capable of binding to DNA target sites of interest.

[0172] Engineered zinc finger binding domain can have a novel binding specificity as compared to a naturally-occurring zinc finger protein. Zinc fingers with desired DNA binding specificity can be designed and selected via various approaches. For example, databases comprising triplet (or quadruplet) nucleotide sequences and individual zinc finger amino acid sequences, in which each triplet or quadruplet nucleotide sequence is associated with one or more amino acid sequences of zinc fingers which bind the particular triplet or quadruplet sequence may be used to design zinc finger arrays for specific DNA sequences. See, for example, U.S. Pat. Nos. 6,453,242, 6,534,261, and 8,772,453, incorporated by reference herein in their entirety. In some embodiments, a zinc finger array may be designed and selected from a library of zinc fingers, e.g., a randomized zinc finger library. In some embodiments, a zinc finger with novel DNA binding specific is generated by selection-based methods on combinatorial libraries. For example, a zinc finger can be selected with phage display which involves displaying zinc finger proteins on the surface of filamentous phage, followed by sequential rounds of affinity selection with biotinylated target DNA to enrich for phage expressing proteins able to bind the specific target sequence. Bacterial-two-hybrid (B2H) system may also be used for selection of zinc fingers that bind specific target sites from randomized libraries. For example, a zinc finger binding site may be placed upstream of a weak promoter driving expression of two selectable markers in host cells, e.g. E. coli cells. A library of zinc fingers, fused to a fragment of the reporter protein, e.g. a yeast Gal11P protein, can be expressed in the cells and binding of a zinc finger to the target site recruits an RNA polymerase-Gal4 fusion, thus activating transcription and allowing survival of the cells on selective medium. Rational design and selection of zinc fingers as described in Maeder et al., 2008, Mol. Cell, 31:294-301; Joung et al., 2010, Nat. Methods, 7:91-92; Isalan et al., 2001, Nat. Biotechnol., 19:656-660, Rebar, et al., Science 263, 671-673 (1994), and Joung, et al. Proc Natl Acad Sci USA 97, 7382-7387 (2000), each of which incorporated herein by reference in its entirety.

[0173] In some embodiments, zinc fingers may be evolved and selected with a continuous evolution system (PACE) comprising a host cell, e.g. a E. coli cell, a “helper phagemid” present in all host cells and encoding all phage proteins except one phage protein (e.g. a g3p protein), an “accessory plasmid”, present in all host cells, that expresses the g3p protein in response to an active library member; and a “selection phagemid” expressing the library of proteins or nucleic acids being evolved, which is replicated and packaged into secreted phage particles. Helper and accessory plasmids can be combined into a single plasmid. New host cells can only be infected by phage particles that contain g3p. Fit selection phagemids encode library members that induce g3p expression from the accessory plasmid can be packaged into phage particles that contain g3p. g3p containing phage particles can infect new cells, leading to further replication of the fit selection phagemids, while g3p-deficient phage particles are non-infectious, and therefore low-fitness selection phagemids cannot propagate. The selection system, in combination with a continuous flow of host cells through a lagoon that permits replication of the phagemid but not the host cells, may be used to rapidly select zinc fingers. PACE system as described in U.S. Pat. No. 9,023,594 is incorporated by reference in its entirety.

[0174] A zinc finger DNA binding domain of an epigenetic editor may include one or multiple zinc fingers. For example, a zinc finger DNA binding domain may include 2, 3, 4, 5, 6, 7, 8, 9, 10, 11, 12 or more zinc fingers. In some embodiments, a zinc finger DNA binding domain has at least three zinc fingers. In some embodiments, a zinc finger DNA binding domain has at least 4, 5, or 6 zinc fingers. In some embodiments, a zinc finger DNA binding domain has three zinc fingers. In some embodiments, a zinc finger DNA binding domain has at least two zinc fingers. In some embodiments, a zinc finger DNA binding domain has an array of two-finger units.

[0175] A zinc finger DNA binding domain of an epigenetic editor may be designed for optimized specificity. In some embodiments, a sequential selection strategy is used to design a multi-finger ZF domain. For example, in a multi-finger ZF domain, a first finger may be randomized and selected with phage display, a small pool of selected fingers may be carried into the next stage, in which the second finger is randomized and selected. The process may be repeated multiple times depending on the number of fingers in the ZF domain. In some embodiments, a parallel optimization is used to design a multi-finger ZF domain. For example, a master randomized library may be interrogated using a B2H system under low selection stringency to identify a variety of individual fingers capable of binding each 3 base pair sub-site of the target site. The three selected populations may then be randomly shuffled to generate a library of multi-finger proteins, which may subsequently be interrogated under high-stringency selection conditions to identify three-finger proteins targeted to a specific nine base pair site. In additional embodiments, a large number of low-stringency selections may be used to generate a master library of single fingers, from which multi-finger proteins, e.g., three finger ZF proteins may be selected. For example, a master library or an archive may include pre-selected zinc finger pools each containing a mixture of fingers targeted to a different three base pair subsite of DNA sequences at a defined position within a three finger ZF protein. In certain embodiments, a zinc finger archive comprises at least 192 finger pools (64 potential three bp target subsites for each position in a three-finger protein). In some embodiments, a zinc finger archive comprises at least a zinc finger pool comprises at least at least 10, 20, 30, 40, 50, 60, 70, 80, 90, 95, 100 or more different fingers. In some embodiments, a smaller library is created form the archive for interrogation with a reporting system, e.g., a bacterial two-hybrid selection system.

[0176] In some embodiments, a multiple-finger ZF domain, e.g., a three-finger ZF domain may be designed and selected using two complementary libraries. For example, a three-finger ZF domain may be designed with two pre-made zinc finger phage-display libraries, where the first library contains randomized DNA-binding amino acid positions in fingers 1 and 2, and a second library contains randomized DNA-binding amino acid positions in fingers 2 and 3. The two libraries are complementary because the first library contains randomizations in all the base-contacting positions of finger 1 and certain base-contacting positions of finger 2, whereas the second library contains randomizations in the remaining base-contacting positions of finger 2 and all the base-contacting positions of finger 3. Selections of “one-and-a-half” fingers from each master library may be carried out in parallel using DNA sequences in which five nucleotides have been fixed to a sequence of interest. Subsequently, zinc finger encoding sequences may be amplified from the recovered phage using PCR, and sets of “one-and-a-half” fingers can be paired to yield recombinant three-finger DNA-binding domains.

[0177] In some embodiments, a multi-finger ZF domain may be designed depending on the context effects of adjacent fingers. In some embodiments, a multi-finger ZF domain is designed and without selection. For example, a three-finger ZF domain may be assembled using N-terminal and C-terminal fingers identified in other arrays containing a common middle finger, using libraries containing an archive of three-finger ZF arrays comprising pre-selected and/or tested three-finger arrays.

[0178] Software for designing and selecting ZF arrays, for example, ZiFit (http://bindr.gdcb.iastate.edu/ZiFiT/; http://www.zincfingers.org/software-tools.htm) are available and known to those skilled in the art.

[0179] Accordingly, a zinc finger DNA binding domain of an epigenetic editor may include one or multiple zinc fingers. For example, a zinc finger DNA binding domain may include 2, 3, 4, 5, 6, 7, 8, 9, 10, 11, 12 or more zinc fingers. In some embodiments, a zinc finger DNA binding domain has at least three zinc fingers. In some embodiments, a zinc finger DNA binding domain has at least 4, 5, or 6 zinc fingers. In some embodiments, a zinc finger DNA binding domain has three zinc fingers. In some embodiments, a zinc finger DNA binding domain comprising at least three zinc fingers recognizes a target DNA sequence of 9 or 10 nucleotides. In some embodiments, a zinc finger DNA binding domain comprising at least four zinc fingers recognizes a target DNA sequence of 12 to 14 nucleotides. In some embodiments, a zinc finger DNA binding domain comprising at least six zinc fingers recognizes a target DNA sequence of 18 to 21 nucleotides.

[0180] In some embodiments, an epigenetic editor as disclosed herein comprises non-natural and suitably contain 3 or more zinc fingers. In some embodiments, an epigenetic editor comprises 4, 5, 6, 8, 9, 10, 11, 12, 13, 14, 15, 16, 17, 18 or more (e.g. up to approximately 30 or 32) zinc fingers motifs arranged adjacent one another in tandem, forming arrays of ZF motifs. In some embodiments, an epigenetic editor includes at least 3 ZF motifs, at least 4 ZF motifs, at least 5 ZF motifs, or at least 6 ZF motifs, at least 7 ZF motifs, at least 8 ZF motifs, at least 9 ZF motifs, at least 10 ZF motifs, at least 11 or at least 12 ZF motifs in the nucleic acid binding domain. In some embodiments, an epigenetic editor includes up to 6, 7, 8, 10, 11, 12, 16, 17, 18, 22, 23, 24, 28, 29, 30, 34, 35, 36, 40, 41, 42, 46, 47, 48, 54, 55, 56, 58, 59, or 60 ZF motifs in the nucleic acid binding domain.

[0181] In some embodiments, a zinc finger or zinc finger array targeting a specific DNA sequence is designed with a modular assembly approach. For example, two or more pre-selected zinc fingers may be fused in a tandem fashion.

[0182] In some embodiments, a zinc finger array comprises multiple zinc fingers fused via peptide bonds. In some embodiments, a zinc finger array comprises multiple zinc fingers, one or more of which connected by peptide linkers. For example, zinc fingers in a multiple finger array can be linked by peptide linkers of 3, 4, 5, 6, 7, 8, 9, 10, 11, 12, 13, 14, 15 or more amino acids in length. In some embodiments, zinc fingers in a multiple finger array are linked by peptide linkers of 5 amino acids in length. In some embodiments, zinc fingers in a multiple finger array are linked by peptide linkers of 6 amino acids in length. In some embodiments, the two-finger units bind adjacent bases and are connected by a linker with the sequence TGSQKP (SEQ ID NO.: 704). In some embodiments the two-finger units bind sequences that are separated by 1 or 2 nucleotides and the two-finger units are separated by a linker with the sequence TGGGGSQKP (SEQ ID NO.: 705).

[0183] In some embodiments, ZF-containing proteins may contain ZF arrays of 2 or more ZF motifs, which may be directly adjacent one another (i.e. separated by a short (canonical) linker sequence), or may be separated by longer, flexible or structured polypeptide sequences. In some embodiments, directly adjacent fingers bind to contiguous nucleic acid sequences, i.e. to adjacent trinucleotides/triplets. In some embodiments, adjacent fingers cross-bind between each other's respective target triplets, which may help to strengthen or enhance the recognition of the target sequence, and leads to the binding of overlapping quadruplet sequences. In some embodiments, distant ZF domains within the same protein may recognize (or bind to) non-contiguous nucleic acid sequences or even to different molecules (e.g. protein rather than nucleic acid).

[0184] In some embodiments, an epigenetic editor comprises zinc fingers comprising more than 3-fingers. In some embodiments, an epigenetic editor comprises at least 6 zinc fingers in the DNA binding domain. In some embodiments, an epigenetic editor comprises 6 zinc fingers in the DNA binding domain that binds to a 18 bp target sequence. In some embodiments, the 18 bp target sequence is unique in the human genome. In some embodiments, an epigenetic editor comprises zinc fingers comprising at least 7, 8, 9, 10, 11, 12, 13, 14, 15 or more zinc fingers. In some embodiments, the strong affinity of three-finger proteins would allow subsets of the longer array to bind DNA and therefore decrease specificity. Without wishing to be bound by any theory, zinc finger proteins comprising multiple two-finger units or three-finger units joined by extended linkers may confer higher DNA binding specificity as compared to fewer fingers, or an array with same number of fingers simply joined via peptide bonds. In some embodiments, an epigenetic editor comprises at least three two-finger units connected by peptide linkers, where each of the two finger units binds a subsite in the target DNA sequence. In some embodiments, an epigenetic editor comprises at least four two-finger units connected by peptide linkers, wherein each of the two finger units binds a subsite in the target DNA sequence. In some embodiments, an epigenetic editor comprises at least five two-finger units connected by peptide linkers, wherein each of the two finger units binds a subsite in the target DNA sequence. In some embodiments, an epigenetic editor comprises at least six, seven, eight, nine, ten, or more two-finger units connected by peptide linkers, wherein each of the two finger units binds a subsite in the target DNA sequence. In some embodiments, an epigenetic editor comprises at least two three-finger units connected by peptide linkers, where each of the three finger units binds a subsite in the target DNA sequence. In some embodiments, an epigenetic editor comprises at least three three-finger units connected by peptide linkers, where each of the three finger units binds a subsite in the target DNA sequence. In some embodiments, an epigenetic editor comprises at least four three-finger units connected by peptide linkers, wherein each of the three finger units binds a subsite in the target DNA sequence. In some embodiments, an epigenetic editor comprises at least five three-finger units connected by peptide linkers, wherein each of the three finger units binds a subsite in the target DNA sequence. In some embodiments, an epigenetic editor comprises at least six, seven, eight, nine, ten, or more three-finger units connected by peptide linkers, wherein each of the three finger units binds a subsite in the target DNA sequence.

[0185] In some embodiments, multiple zinc fingers, each recognizing three specific DNA nucleotides, or trinucleotide “subsites”, are assembled to target specific DNA sequences in target genes. In some embodiments, such DNA subsites are contiguous sequences in a target gene. In some embodiments, one or more of the DNA subsites are separated by gaps in the target gene. for example, a multi-finger ZF may recognize DNA subsites that span a 1, 2, 3 or more base pairs of inter-subsite gaps between adjacent subsites. In some embodiments, zinc fingers in the multi-finger ZF are connect via peptide linkers. The peptide linkers may be of 2, 3, 4, 5, 6, 7, 8, 9, 10, 11, 12, 13, 14, 15, 16, 17, 18, 19, 20, or more amino acids in length. In some embodiments, a linker comprises 5 or more amino acids. In some embodiments, a linker comprises 7-17 amino acids. In some embodiments, the linker is a flexible linker. In some embodiments, the linker is a rigid linker, e.g., a linker comprising one or more Prolines.

[0186] Zinc finger arrays with sequence specific DNA binding activity may be fused to functional effector domains, e.g. epigenetic effector domains as described herein to confer epigenetic modifications to DNA sequences, or associated histones in a target gene. In some embodiments, an epigenetic editor described herein comprises a zinc finger array having specificity for a target DNA sequence. In some embodiments a zinc finger array may have the sequence:

(SEQ ID NO.: 1157)
SRPGERPFQCRICMRNFSNNNNNNNHTRTHTGEKPFQCRICMRNFSNNN
NNNNHLRTH[linker]FQCRICMRNFSNNNNNNNHTRTHTGEKPFQCR
ICMRNFSNNNNNNNHLRTH[linker]FQCRICMRNFSNNNNNNNHTRT
HTGEKPFQCRICMRNFSNNNNNNNHLRTHLRGS.

[0187] Where NNNNNNN represents the amino acids of the zinc finger recognition helix, which confer DNA-binding specificity upon the zinc finger. And [linker] represents a linker sequence. In some embodiments the linker sequence may be TGSQKP (SEQ ID NO.: 704). In some embodiments the linker sequence may be TGGGGSQKP (SEQ ID NO.: 705). In some embodiments, the two linkers of the zinc finger array are the same. In some embodiments, the two linkers of the zinc finger array are different.

[0188] In some embodiments, the programmable DNA binding protein comprises an argonaute protein. One example of such a nucleic acid programmable DNA binding protein is an Argonaute protein from Natronobacterium gregoryi (NgAgo). NgAgo is a ssDNA-guided endonuclease. NgAgo binds 5′ phosphorylated ssDNA of −24 nucleotides (gDNA) to guide it to its target site and will make DNA double-strand breaks at the gDNA site. In contrast to Cas9, the NgAgo-gDNA system does not require a protospacer-adjacent motif (PAM). Using a nuclease inactive NgAgo (dNgAgo) can greatly expand the bases that may be targeted. The characterization and use of NgAgo have been described in Gao et al., Nat Biotechnol., 2016 July; 34(7):768-73. PubMed PMID: 27136078; Swarts et al., Nature. 507(7491) (2014):258-61; and Swarts et al., Nucleic Acids Res. 43(10) (2015):5120-9, each of which is incorporated herein by reference.

[0189] In some embodiments, the nucleic acid binding domain comprises a virus derived RNA-binding domain guided by an RNA sequence to bind the target gene. In some embodiments, the nucleic acid binding domain comprises a K Homology (KH) domain, a MS2 coat protein domain, a PP7 coat protein domain, a SfMu Com coat protein domain, a sterile alpha motif, a telomerase Ku binding motif and Ku protein, a telomerase Sm7 binding motif and Sm7 protein, or any other RNA recognition motifs.

[0190] In some embodiments, the nucleic acid binding domain comprises an inactivated nuclease, for example, an inactivated meganuclease. Additional non-limiting examples of DNA binding domains include tetracycline-controlled repressor (tetR) DNA binding domain, leucine zippers, helix-loophelix (HLH) domains, helix-turn-helix domains, zinc fingers, R-sheet motifs, steroid receptor motifs, bZIP domains homeodomains, and AT-hooks.

### Effector Domains

[0191] Epigenetic editors or epigenetic editing complexes provided herein may include one or more effector protein domains that modulate expression of a target gene. An effector domain can be used to contact a target polynucleotide sequence in a target gene to effect an epigenetic modification, for example, a change in methylation state of DNA nucleotides in the target gene. Accordingly, an epigenetic editor with one or more effector domains may provide the effect of modulating expression of a target gene without altering the DNA sequence of the target gene. For example, in some embodiments, an effector domain results in repression or silencing of expression of a target gene. In some embodiments, an effector domain results in activation or increased expression of a target gene.

[0192] In an aspect, the epigenetic modification described herein is sequence specific, or allele specific. For example, an epigenetic editor may specifically target a DNA sequence recognized by a DNA binding domain of the epigenetic editor. In some embodiments, the target DNA sequence is specific to one copy of a target gene. In some embodiments, the target gene sequence is specific to one allele of a target gene. Accordingly, the epigenetic modification and modulation of expression thereof may be specific to one copy or one allele of the target gene. For example, an epigenetic editor may repress or activate expression of a specific copy harboring a target sequence recognized by the DNA binding domain. In some embodiments, the epigenetic editor represses expression of a specific copy of a target gene, wherein the copy is associated with a disease or disorder. In some embodiments, the epigenetic editor represses expression of a specific copy of a target gene, wherein the copy harbors a mutation associated with a disease or disorder. In some embodiments, the epigenetic editor activates expression of a specific copy of a target gene. In some embodiments, the epigenetic editor activates expression of a specific copy of a target gene that is a wild type copy. The epigenetic modification mediated by an epigenetic editor may be in the vicinity of the target gene, or may be distal to the target gene. In some embodiments, an epigenetic editor may initiate a chemical modification, e.g, DNA methylation, in one or more nucleotides of the target gene. Such methylation may be initiated near the target sequence, and may subsequently spread to one or more nucleotides in the target gene distant from the target sequence.

[0193] An epigenetic effector may deposit a chemical modification at the chromatin at the position of a target gene. Non limiting examples of chemical modifications include methylation, demethylation, acetylation, deacetylation, phosphorylation, SUMOylation and/or ubiquitination of the DNA or histone residues of the chromatin. In some embodiments, an epigenetic effector may make histone tail modifications. In some embodiments epigenetic effectors may add or remove active marks on histone tails. In some embodiments the active marks may include H3K4 methylation, H3K9 acetylation, H3K27 acetylation, H3K36 methylation, H3K79 methylation, H4K5 acetylation, H4K8 acetylation, H4K12 acetylation, H4K16 acetylation, and/or H4K20 methylation. In some embodiments epigenetic effectors may add or remove repressive marks on histone tails. In some embodiments these repressive marks may include H3K9 methylation and/or H3K27 methylation.

[0194] In some embodiments, an effector domain in an epigenetic editor alters a chemical modification state of a target gene harboring a target sequence. For example, an effector domain may alter a chemical modification state of a nucleotide in the target gene. In some embodiments, an effector domain of an epigenetic editor deposits a chemical modification at a nucleotide in the target gene. In some embodiments, an effector domain of an epigenetic editor deposits a chemical modification of a histone associated with the target gene. In some embodiments, an effector domain of an epigenetic editor removes a chemical modification at a nucleotide in the target gene. In some embodiments, an effector domain of an epigenetic editor removes a chemical modification of a histone associated with the target gene. In some embodiments, the chemical modification increases expression of the target gene. For example, the epigenetic editor may comprise an effector domain having histone acetyltransferase activity. In some embodiments, the chemical modification decreases expression of the target gene. For example, the epigenetic editor may comprise an effector domain having DNA methyltransferase activity.

[0195] The chemical modifications may be deposited or removed by the epigenetic editor in any region of a target gene. In some embodiments, the chemical modification is deposited or removed at a single nucleotide. In some embodiments, the chemical modification is deposited or removed at a single histone. In some embodiments, the chemical modification is deposited at more than 10, 20, 30, 40, 50, 60, 70, 80, 90, 100, 200, 300, 400, 500, 600, 700, 800, 900, 1000, 1500, 2000, 2500, 3000 or more nucleotides. In some embodiments, the chemical modification is removed from more than 10, 20, 30, 40, 50, 60, 70, 80, 90, 100, 200,300, 400, 500, 600, 700, 800, 900, 1000, 1500, 2000, 2500, 3000 or more nucleotides. In some embodiments, the effector domain of an epigenetic editor alters a chemical modification in a nucleotide in a promoter region of the target gene. In some embodiments, the effector domain of an epigenetic editor alters a chemical modification in at least 2, 3, 4, 5, 6, 7, 8, 9, 10, 11, 12, 13, 14, 15, 16, 17, 18, 19, 20, 30, 40, 50, 60, 70, 80, 90, 100, 200, 300, 400, 500, 600, 700, 800, 900, 1000, 1500, 2000, 2500, 3000 or more nucleotides in a promoter region of the target gene. In some embodiments, the effector domain of an epigenetic editor alters a chemical modification in a nucleotide in a enhancer region of the target gene. In some embodiments, the effector domain of an epigenetic editor alters a chemical modification in at least 2, 3, 4, 5, 6, 7, 8, 9, 10, 11, 12, 13, 14, 15, 16, 17, 18, 19, 20, 30, 40, 50, 60, 70, 80, 90, 100, 200, 300, 400, 500, 600, 700, 800, 900, 1000, 1500, 2000, 2500, 3000 or more nucleotides in a enhancer region of the target gene. In some embodiments, the effector domain of an epigenetic editor alters a chemical modification in a nucleotide in a coding region of the target gene. In some embodiments, the effector domain of an epigenetic editor alters a chemical modification in at least 2, 3, 4, 5, 6, 7, 8, 9, 10, 11, 12, 13, 14, 15, 16, 17, 18, 19, 20, 30, 40, 50, 60, 70, 80, 90, 100, 200, 300, 400, 500, 600, 700, 800, 900, 1000, 1500, 2000, 2500, 3000 or more nucleotides in a coding region of the target gene. In some embodiments, the effector domain of an epigenetic editor alters a chemical modification in a nucleotide in an exon of the target gene. In some embodiments, the effector domain of an epigenetic editor alters a chemical modification in at least 2, 3, 4, 5, 6, 7, 8, 9, 10, 11, 12, 13, 14, 15, 16, 17, 18, 19, 20, 30, 40, 50, 60, 70, 80, 90, 100, 200, 300, 400, 500, 600, 700, 800, 900, 1000, 1500, 2000, 2500, 3000 or more nucleotides in an exon of the target gene. In some embodiments, the effector domain of an epigenetic editor alters a chemical modification in a nucleotide in an intron of the target gene. In some embodiments, the effector domain of an epigenetic editor alters a chemical modification in at least 2, 3, 4, 5, 6, 7, 8, 9, 10, 11, 12, 13, 14, 15, 16, 17, 18, 19, 20, 30, 40, 50, 60, 70, 80, 90, 100, 200, 300, 400, 500, 600, 700, 800, 900, 1000, 1500, 2000, 2500, 3000 or more nucleotides in an intron of the target gene. In some embodiments, the effector domain of an epigenetic editor alters a chemical modification in a nucleotide in an insulator region of the target gene or chromosome. In some embodiments, the effector domain of an epigenetic editor alters a chemical modification in at least 2, 3, 4, 5, 6, 7, 8, 9, 10, 11, 12, 13, 14, 15, 16, 17, 18, 19, 20, 30, 40, 50, 60, 70, 80, 90, 100, 200, 300, 400, 500, 600, 700, 800, 900, 1000, 1500, 2000, 2500, 3000 or more nucleotides in an insulator region of the target gene or chromosome. In some embodiments, the effector domain of an epigenetic editor alters a chemical modification in a nucleotide in a silencer region of the target gene or chromosome. In some embodiments, the effector domain of an epigenetic editor alters a chemical modification in at least 2, 3, 4, 5, 6, 7, 8, 9, 10, 11, 12, 13, 14, 15, 16, 17, 18, 19, 20, 30, 40, 50, 60, 70, 80, 90, 100, 200, 300, 400, 500, 600, 700, 800, 900, 1000, 1500, 2000, 2500, 3000 or more nucleotides in a silencer region of the target gene or chromosome. In some embodiments, the chemical modification is altered at a CTCF binding region of a target gene or chromosome. In some embodiments, the alteration of the chemical modification state is at or near a transcription initiation site (TSS). In some embodiments, the alteration of the chemical modification state is 1, 2, 3, 4, 5, 6, 7, 8, 9, 10, 11, 12, 13, 14, 15, 16, 17, 18, 19, 20, 30, 40, 50, 60, 70, 80, 90, 100, 200, 300, 400, 500, 600, 700, 800, 900, or 1000, 1500, 2000, 2500, 3000 nucleotides upstream of a TSS. In some embodiments, the alteration of the chemical modification state is 1, 2, 3, 4, 5, 6, 7, 8, 9, 10, 11, 12, 13, 14, 15, 16, 17, 18, 19, 20, 30, 40, 50, 60, 70, 80, 90, 100, 200, 300, 400, 500, 1000, 1500, 2000, 2500, 3000 nucleotides flanking a TSS. In some embodiments, the alteration of the chemical modification state is a DNA methylation state, for example, methylation of DNA near TSS by an epigenetic editor comprising an effector domain with DNA methyltransferase activity, thereby reducing or silencing expression of the target gene.

[0196] The epigenetic modification mediated by an epigenetic editor may be in the vicinity of the target gene, or may be distant to the target gene, or spread from an initial epigenetic modification initiated by the epigenetic editor at one or more nucleotides in a target sequence of the target gene. For example, an epigenetic editor may initiate a chemical modification, e.g, DNA methylation, in one or more nucleotides of the target gene. Such methylation may be initiated near the target sequence, and may subsequently spread to one or more nucleotides in the target gene distant from the target sequence. In some embodiments, the epigenetic editor places, deposits, or removes a modification at a single nucleotide in a target sequence in the target gene, which subsequently spreads to one or more nucleotides upstream or downstream of the single nucleotide. In some instances, additional proteins or transcription factors, for example, transcription repressors, methyltransferases, or transcription regulation scaffold proteins, are involved in the spreading of the chemical modification. In some instances, distant modification is solely mediated by the epigenetic editor. In some embodiments, the chemical modification mediated by an epigenetic editor is 50, 100, 150, 200, 250, 300, 350, 400, 450, or 500 nucleotides from the epigenetic editing target sequence. In some embodiments, the chemical modification mediated by an epigenetic editor is 50, 100, 150, 200, 250, 300, 350, 400, 450, or 500 nucleotides upstream of the epigenetic editing target sequence. In some embodiments, the chemical modification mediated by an epigenetic editor is 50, 100, 150, 200, 250, 300, 350, 400, 450, or 500 nucleotides downstream of the epigenetic editing target sequence. In some embodiments, the chemical modification mediated by an epigenetic editor is at least 500, 600, 700, 800, 900, 1000, 1100, 1200, 1300, 1400, 1500, 1600, 1700, 1800, 1900, 2000 or more nucleotides from the epigenetic editing target sequence. In some embodiments, the chemical modification mediated by an epigenetic editor is at least 500, 600, 700, 800, 900, 1000, 1100, 1200, 1300, 1400, 1500, 1600, 1700, 1800, 1900, 2000 or more nucleotides upstream of the epigenetic editing target sequence. In some embodiments, the chemical modification mediated by an epigenetic editor is at least 500, 600, 700, 800, 900, 1000, 1100, 1200, 1300, 1400, 1500, 1600, 1700, 1800, 1900, 2000 or more nucleotides downstream of the epigenetic editing target sequence.

[0197] Chemical modifications that may be deposited or removed from a target gene or chromosome region include, but are not limited to DNA or histone methylation, de-methylation, acetylation, deacetylation, phosphorylation, ubiquitination, or any combination thereof.

[0198] In some embodiments, the alteration of the chemical modification state is a DNA methylation state. For example, methylation can be introduced by an effector domain having DNA methyltransferase activity, or can be removed by an effector domain having DNA-demethylase activity. In some embodiments, alteration in methylation state mediated by an epigenetic effector is at a CpG dinucleotide sequence in the target gene or chromosome. In some embodiments, alteration in methylation state mediated by an epigenetic effector is at 1, 2, 3, 4, 5, 6, 6, 7, 8, 9, 10, 11, 12, 13, 14, 15, 16, 17, 18, 19, 20, 30, 40, 50, 60, 70, 80, 90, 100, 200, 300, 400, 500, 600, 700, 800, 900, or 1000 CpG dinucleotide sequences in the target gene or chromosome. In some embodiments, the CpG dinucleotide sequences are methylated. In some embodiments, the CpG dinucleotide sequences are de-methylated. In some embodiments, CpG dinucleotide sequences methylated by the epigenetic editor are within target gene or chromosome regions known as CpG islands. In some embodiments, the CpG dinucleotide sequences methylated by the epigenetic editor are not in a CpG island. A CpG island generally refers to a nucleic acid sequence or chromosome region that comprises high frequency of CpG dinucleotides. For example, a CpG island may comprise at least 50% of GC content. In embodiments, a CpG island has a high of observed-to-expected CpG ratio, for example, an observed-to-expected CpG ratio of at least 60%. As used herein, observed-to-expected CpG ratio is determined by Number of CpG*(sequence length)/(Number of C*Number of G). In some embodiments, the CpG island has an observed-to-expected CpG ratio of at least 60%, 70%, 80%, 90% or more. In some embodiments, the CpG island is a sequence or region of at least 200 nucleotides. In some embodiments, the CpG island is a sequence or region of at least 250 nucleotides. In some embodiments, the CpG island is a sequence or region of at least 300 nucleotides. In some embodiments, the CpG island is a sequence or region of at least 350 nucleotides. In some embodiments, the CpG island is a sequence or region of at least 400 nucleotides. In some embodiments, the CpG island is a sequence or region of at least 450 nucleotides. In some embodiments, the CpG island is a sequence or region of at least 500 nucleotides. In some embodiments, the CpG island is a sequence or region of at least 550 nucleotides. In some embodiments, the CpG island is a sequence or region of at least 550, at least 600, at least 650, at least 700, at least 750, at least 800 or more nucleotides. In some embodiments, only 1, 2, 3, 4, 5, 6, 6, 7, 8, 9, 10, 11, 12, 13, 14, 15, 16, 17, 18, 19, 20, 30, 40, or less than 50 CpG dinucleotides are methylated by the epigenetic editor. In some embodiments, CpG dinucleotide sequences de-methylated by the epigenetic editor are within target gene or chromosome regions known as CpG islands. In some embodiments, the CpG dinucleotide sequences de-methylated by the epigenetic editor are not in a CpG island. In some embodiments, only 1, 2, 3, 4, 5, 6, 6, 7, 8, 9, 10, 11, 12, 13, 14, 15, 16, 17, 18, 19, 20, 30, 40, or less than 50 CpG dinucleotides are de-methylated by the epigenetic editor. In some embodiments, sequence within about 3000 base pairs of the target sequence are methylated by the epigenetic editor. In some embodiments, sequences that is within about 3000, 2900, 2800, 2700, 2600, 2500, 2400, 2300, 2200, 2100, 2000, 1900, 1800, 1700, 1600, 1500, 1400, 1300, 1200, 1100, 1000, 900, 800, 700, 600, 500, 400, 300, 200, or 100 base pairs of the target sequence are methylated by the epigenetic editor.

[0199] In some embodiments, the alteration of chemical modification, e.g., methylation, is at a hypomethylated nucleic acid sequence. For example, the chemically modified sequence in the target gene or chromosome region may lack methyl groups on the 5-methyl cytosine nucleotide (e.g., in CpG) as compared to a standard control. Hypomethylation may occur, for example, in aging cells or in cancer (e.g., early stages of neoplasia) relative to the younger cell or non-cancer cell, respectively. In some embodiments, the target polynucleotide sequence is within a CpG island. In some embodiments, the target gene is known to be associated with a disease or condition. In some embodiments, the target gene comprises a specific copy of disease related sequence. In some embodiments, the target gene harbors the target sequence which is related to a disease.

[0200] In some embodiments, the alteration of chemical modification, e.g., methylation, is at a hypermethylated nucleic acid sequence. In some embodiments, the chemical modification is within a CpG island.

[0201] Chromatin or DNA sequences chemically modified in the target gene may be within or near the target sequence recognized by an epigenetic editor. In some embodiments, DNA sequence within about 3000 base pairs of the target nucleic acid sequence is chemically modified, e.g., methylated, by the epigenetic editor. In some embodiments, DNA sequence within about 3000, 2900, 2800, 2700, 2600, 2500, 2400, 2300, 2200, 2100, 2000, 1900, 1800, 1700, 1600, 1500, 1400, 1300, 1200, 1100, 1000, 900, 800, 700, 600, 500, 400, 300, 200, or 100 base pairs of the target nucleic acid sequence is chemically modified by the epigenetic editor.

[0202] In some embodiments, chemical modification, e.g. methylation or demethylation, may be introduced by the epigenetic editor in a target gene where the modification isn't at a CpG dinucleotide. For example, the target gene sequence may be de-methylated at the C nucleotide of CpA, CpT, or CpC sequences. Without wishing to be bound by any theory, DNMT3A may be able to methylate nucleotides at non-CpG sites. In some embodiments, an epigenetic editor comprises a DNMT3A domain and effects methylation at CpG, CpA, CpT, and/or CpC sequences. In some embodiments, an epigenetic editor comprises a DNMT3A domain that lacks a regulatory subdomain and only maintains a catalytic domain. In some embodiments, the epigenetic editor comprising a DNMT3A with catalytic domain only effects methylation exclusively at CpG sequences. In some embodiments, an epigenetic editor comprises a DNMT3A domain comprises a mutation, e.g. a R836A mutation, has higher methylation activity at CpA, CpC, and/or CpT sequences as compared to an epigenetic editor comprising a wild type DNMT3A domain.

[0203] In some embodiments, the effector domain comprises a transcription related protein. For example, the effector domain may comprise a transcription factor, a transcription activator, or a transcription repressor. In some embodiments, the effector domain in an epigenetic editor recruits one or more transcription related proteins to a target gene that harbors a target sequence. For example, the effector domain may recruit a transcription factor, a transcription activator, or a transcription repressor to the target gene harboring the target sequence. In some embodiments, the transcription related proteins are endogenous. In some embodiments, the transcription related proteins are introduced together or sequentially with the epigenetic editor. In some embodiments, the transcription related protein is recruited to a region of the target gene in close proximity to the target sequence. In some embodiments, the transcription related protein is recruited to a region that is 100-200 bp, 200-300 bp, 300-400 bp, 400-500 bp, 500-600 bp, 600-700 bp, 700-800 bp, 800-900 bp, 900-1000 bp or more 5′ to the target sequence. In some embodiments, the transcription related protein is recruited to a region of the target gene in close proximity to the target sequence. In some embodiments, the transcription related protein is recruited to a region that is 100-200 bp, 200-300 bp, 300-400 bp, 400-500 bp, 500-600 bp, 600-700 bp, 700-800 bp, 800-900 bp, 900-1000 bp or more 3′ to the target sequence. In some embodiments, the effector domain comprises a protein that blocks or recruits one or more proteins that block access of a transcription factor to the target gene harboring the target sequence.

[0204] An effector domain alters a chemical modification state of DNA or histone residues associated with the DNA in a target gene. For example, an effector domain may deposit a chemical modification, or remove a chemical modification, such as DNA methylation, histone tail methylation, or histone tail acetylation at DNA nucleotides in or histone residues bound to a target gene. In some embodiments, an effector domain may directly or indirectly mediate or induce a chemical modification, or remove a chemical modification, such as DNA methylation, histone tail methylation, or histone tail acetylation at DNA nucleotides in or histone residues bound to a target gene. For example, an effector domain may place, deposit, or remove an initial epigenetic modification, e.g., DNA methylation, at one or more nucleotides in a target sequence of the target gene, and the epigenetic modification state may then spread to nucleotides 100, 200, 300, 400, 500, 600, 700, 800, 900, 1000, 1500, 2000, 2500, 3000 or more base pairs upstream or downstream of the initial epigenetic modification sites. The chemical modification deposited at target gene DNA nucleotides or histone residues may be in close proximity to a target sequence (sequence recognized by a DNA binding portion of an epigenetic editor) in the target gene, or may be distant from the target sequence. In some embodiments, an effector domain alters a chemical modification state of a nucleotide or histone tail bound to a nucleotide within 10, 20, 30, 40, 50, 60, 70, 80, 90, 100, 200, 300, 400, 500, 600, 700, 800, 900, or 1000 nucleotides flanking the target sequence. As used herein, “flanking” refers to nucleotide positions 5′ to the 5′ end of and 3′ to the 3′ end of a particular sequence, e.g. a target sequence. In some embodiments, an effector domain mediates or induces a chemical modification change of a nucleotide or a histone tail bound to a nucleotide distant from a target sequence. Without wishing to be bound by any theory, an epigenetic editor effector domain may initiate a chemical modification, e.g, DNA methylation, in one or more nucleotides of the target gene. Such modification may be initiated near the target sequence, and may subsequently spread to one or more nucleotides in the target gene distant from the target sequence. In some instances, additional proteins or transcription factors, for example, transcription repressors, methyltransferases, or transcription regulation scaffold proteins, are involved in the spreading of the chemical modification. In some embodiments, an effector domain initiates alteration of a chemical modification state of one or more nucleotides or one or more histone residues bound to one or more nucleotides within 10, 20, 30, 40, 50, 60, 70, 80, 90, 100, 200, 300, 400, 500 nucleotides flanking the target sequence, and the chemical modification state alteration spreads to one or more nucleotides at least 500, 600, 700, 800, 900, 1000, 1100, 1200, 1300, 1400, 1500, 1600, 1700, 1800, 1900, 2000 or more nucleotides from the target sequence in the target gene, either upstream or downstream of the target sequence. In certain embodiments, the chemical modification, e.g., methylation or demethylation, maybe initiated at less than 2, 3, 5, 10, 20, 30, 40, 50, or 100 nucleotides in the target gene and spreads to at least 100, 200, 300, 400, 500, 600, 700, 800, 900, 1000, 2000, or more nucleotides in the target gene. In some embodiments, the chemical modification spreads to nucleotides in the entire target gene. In some embodiments, the alteration in modification state is a DNA methylation state. In some embodiments, the alteration in modification state is a histone methylation state. In some embodiments, the alteration in modification state is a histone acetylation state.

[0205] In some embodiments, an effector domain makes an epigenetic modification at a target gene that increases or activates expression of the target gene. In some embodiments, an effector domain alters a chemical modification state of DNA or histone residues associated with the DNA in a target gene harboring the target sequence, thereby increasing expression of the target gene. In some embodiments, the alteration in chemical modification state comprises removal of a methyl group form a DNA nucleotide in the target gene. In some embodiments, the alteration in chemical modification state comprises acetylation of a histone tail bound to a DNA nucleotide in the target gene. In some embodiments, the alteration in chemical modification state comprises methylation of a histone tail bound to a DNA nucleotide in the target gene, e.g., a H3K4me1 methylation. In some embodiments, the alteration in chemical modification state comprises removal of an acetyl group from histone tail bound to a DNA nucleotide in the target gene, e.g., a H3K9me2 methylation. An epigenetic editor may initiate a chemical modification, in one or more nucleotides of the target gene, near the target sequence, which may subsequently spread to one or more nucleotides in the target gene distant from the target sequence, thereby increasing or activating expression of the target gene. In some instances, distant modification is solely mediated by the epigenetic editor. In some instances, additional proteins or transcription factors, for example, transcription activators, are involved in the spreading of the chemical modification. In some embodiments, an effector domain alters a chemical modification state of a nucleotide 50, 60, 70, 80, 90, 100, 200, 300, 400, 500, 600, 700, 800, 900, or1000 nucleotides flanking a target sequence in a target gene, thereby increasing expression of the target gene. In some embodiments, an effector domain initiates alteration of a chemical modification state of one or more nucleotides or one or more histone residues bound to one or more nucleotides within 10, 20, 30, 40, 50, 60, 70, 80, 90, 100, 200, 300, 400, 500 nucleotides flanking the target sequence, and the chemical modification state alteration spreads to one or more nucleotides at least 500, 600, 700, 800, 900, 1000, 1100, 1200, 1300, 1400, 1500, 1600, 1700, 1800, 1900, 2000 or more nucleotides flanking the target sequence in the target gene, thereby increasing or activating expression of the target gene.

[0206] In some embodiments, an effector domain alters a chemical modification state, e.g., demethylation of a nucleotide, 100-200 nucleotides 5′ to the target sequence in the target gene, thereby increasing expression of the target gene. In some embodiments, an effector domain alters a chemical modification state of a nucleotide 200-300 nucleotides 5′ to the target sequence in the target gene, thereby increasing expression of the target gene. In some embodiments, an effector domain alters a chemical modification state of a nucleotide 300-400 nucleotides 5′ to the target sequence in the target gene, thereby increasing expression of the target gene. In some embodiments, an effector domain alters a chemical modification state of a nucleotide 400-500 nucleotides 5′ to the target sequence in the target gene, thereby increasing expression of the target gene. In some embodiments, an effector domain alters a chemical modification state of a nucleotide 500-600 nucleotides 5′ to the target sequence in the target gene, thereby increasing expression of the target gene. In some embodiments, an effector domain alters a chemical modification state of a nucleotide 600-700 nucleotides 5′ to the target sequence in the target gene, thereby increasing expression of the target gene. In some embodiments, an effector domain alters a chemical modification state of a nucleotide 700-800 nucleotides 5′ to the target sequence in the target gene, thereby increasing expression of the target gene. In some embodiments, an effector domain initiates alteration of a chemical modification state of one or more nucleotides or one or more histone residues bound to one or more nucleotides within 10, 20, 30, 40, 50, 60, 70, 80, 90, 100, 200, 300, 400, 500 nucleotides flanking the target sequence, and the chemical modification state alteration spreads to one or more nucleotides at least 500, 600, 700, 800, 900, 1000, 1100, 1200, 1300, 1400, 1500, 1600, 1700, 1800, 1900, 2000 or more nucleotides 5′ to the target sequence in the target gene, thereby increasing or activating expression of the target gene, thereby increasing expression of the target gene.

[0207] In some embodiments, an effector domain alters a chemical modification state, e.g., demethylation of a nucleotide, of a nucleotide 100-200 nucleotides 3′ to the target sequence in the target gene, thereby increasing expression of the target gene. In some embodiments, an effector domain alters a chemical modification state of a nucleotide 200-300 nucleotides 3′ to the target sequence in the target gene, thereby increasing expression of the target gene. In some embodiments, an effector domain alters a chemical modification state of a nucleotide 300-400 nucleotides 3′ to the target sequence in the target gene, thereby increasing expression of the target gene. In some embodiments, an effector domain alters a chemical modification state of a nucleotide 400-500 nucleotides 3′ to the target sequence in the target gene, thereby increasing expression of the target gene. In some embodiments, an effector domain alters a chemical modification state of a nucleotide 500-600 nucleotides 3′ to the target sequence in the target gene, thereby increasing expression of the target gene. In some embodiments, an effector domain alters a chemical modification state of a nucleotide 600-700 nucleotides 3′ to the target sequence in the target gene, thereby increasing expression of the target gene. In some embodiments, an effector domain alters a chemical modification state of a nucleotide 700-800 nucleotides 3′ to the target sequence in the target gene, thereby increasing expression of the target gene. In some embodiments, the chemical modification state is a methylation state. In some embodiments, the effector domain of an epigenetic effector results in demethylation of one or more nucleotides in the target gene, thereby increasing expression of the target gene. In some embodiments, an effector domain initiates alteration of a chemical modification state, e.g. DNA demethylation, of one or more nucleotides or one or more histone residues bound to one or more nucleotides within 10, 20, 30, 40, 50, 60, 70, 80, 90, 100, 200, 300, 400, 500 nucleotides flanking the target sequence, and the chemical modification state alteration spreads to one or more nucleotides at least 500, 600, 700, 800, 900, 1000, 1100, 1200, 1300, 1400, 1500, 1600, 1700, 1800, 1900, 2000 or more nucleotides 3′ to the target sequence in the target gene, thereby increasing or activating expression of the target gene, thereby increasing expression of the target gene.

[0208] In some embodiments, an effector domain alters a histone modification state of a histone associated with or bound to the target gene. For example, an effector domain may deposit a modification on one or more lysine residues of histone tails of histones associated with the target gene. The histone amino acid residues modified may be within the vicinity of the target sequence within the target gene. In some embodiments, an effector domain alters a histone modification state 50, 60, 70, 80, 90, 100, 200, 300, 400, 500, 600, 700, 800, 900, 1000 or more nucleotides 5′ or 3′ to the target sequence in the target gene, thereby increasing expression of the target gene. In some embodiments, an effector domain alters a histone modification state 100-200 nucleotides 5′ to the target sequence in the target gene, thereby increasing expression of the target gene. In some embodiments, an effector domain alters a histone modification state 200-300 nucleotides 5′ to the target sequence in the target gene, thereby increasing expression of the target gene. In some embodiments, an effector domain alters a histone modification state 300-400 nucleotides 5′ to the target sequence in the target gene, thereby increasing expression of the target gene. In some embodiments, an effector domain alters a histone modification state 400-500 nucleotides 5′ to the target sequence in the target gene, thereby increasing expression of the target gene. In some embodiments, an effector domain alters a histone modification state 500-600 nucleotides 5′ to the target sequence in the target gene, thereby increasing expression of the target gene. In some embodiments, an effector domain alters a histone modification state 600-700 nucleotides 5′ to the target sequence in the target gene, thereby increasing expression of the target gene. In some embodiments, an effector domain alters a histone modification state 700-800 nucleotides 5′ to the target sequence in the target gene, thereby increasing expression of the target gene. In some embodiments, an effector domain alters a histone modification state 50, 60, 70, 80, 90, 100, 200, 300, 400, 500, 600, 700, 800, 900, 1000 or more nucleotides 5′ or 3′ to the target sequence in the target gene, thereby increasing expression of the target gene. In some embodiments, an effector domain alters a histone modification state 100-200 nucleotides 3′ to the target sequence in the target gene, thereby increasing expression of the target gene. In some embodiments, an effector domain alters a histone modification state 200-300 nucleotides 3′ to the target sequence in the target gene, thereby increasing expression of the target gene. In some embodiments, an effector domain alters a histone modification state 300-400 nucleotides 3′ to the target sequence in the target gene, thereby increasing expression of the target gene. In some embodiments, an effector domain alters a histone modification state 400-500 nucleotides 3′ to the target sequence in the target gene, thereby increasing expression of the target gene. In some embodiments, an effector domain alters a histone modification state 500-600 nucleotides 3′ to the target sequence in the target gene, thereby increasing expression of the target gene. In some embodiments, an effector domain alters a histone modification state 600-700 nucleotides 3′ to the target sequence in the target gene, thereby increasing expression of the target gene. In some embodiments, an effector domain alters a histone modification state 700-800 nucleotides 3′ to the target sequence in the target gene, thereby increasing expression of the target gene. In some embodiments, the histone modification state is a acetylation state. In some embodiments, the effector domain of an epigenetic effector results in acetylation of one or more histone tails of histones associated with the target gene, thereby increasing expression of the target gene. In some embodiments, the histone modification state is a methylation state. In some embodiments, the epigenetic effector results in H3K4 or H3K79 methylation (e.g. one or more of a H3K4me2, H3K4me3, and H3K79me3 methylation) at one or more histone tails associated with the target gene, thereby increasing expression of the target gene.

[0209] In some embodiments, an effector domain makes an epigenetic modification at a target gene that represses, decreases, or silences expression of the target gene. In some embodiments, an effector domain alters a chemical modification state of DNA or histone residues associated with the DNA in a target gene harboring the target sequence, thereby reducing or silencing expression of the target gene. Epigenetic editors that decrease expression of a target gene may comprise multiple effector domains, resulting in multiple modifications to a target gene, for example, both DNA methylation and histone tail de-acetylation. In some embodiments, an effector domain alters a chemical modification state of DNA in the target gene or histone bound to the target gene near the target sequence, thereby decreasing expression of the target gene. In some embodiments, an effector domain alters a chemical modification state of DNA in the target gene or histone bound to the target gene distant from the target sequence in the target gene, thereby decreasing expression of the target gene. In some embodiments, an effector domain mediates or induces a chemical modification state of DNA in the target gene or histone bound to the target gene that are distant from the target sequence in the target gene. For example, an epigenetic editor may initiate a chemical modification, e.g, DNA methylation, in one or more nucleotides of the target gene. Such modification may be initiated near the target sequence, and may subsequently spread to one or more nucleotides in the target gene distant from the target sequence, thereby decreasing expression of the target gene. In some instances, the distant modification is solely mediated by the epigenetic editor. In some instances, additional proteins or transcription factors, for example, transcription repressors, methyltransferases, or transcription regulation scaffold proteins, are involved in the spreading of the chemical modification. In some embodiments, an effector domain alters a chemical modification state of a nucleotide 50, 60, 70, 80, 90, 100, 200, 300, 400, 500, 600, 700, 800, 900, 1000 1100, 1200, 1300, 1400, 1500, 1600, 1700, 1800, 1900, 2000 or more nucleotides 5′ or 3′ to the target sequence in the target gene, thereby reducing or silencing expression of the target gene. In some embodiments, an effector domain alters a chemical modification state, e.g., DNA methylation, of one or more nucleotides in close proximity to the target gene, and the altered chemical modification state subsequently spreads to nucleotides 100, 200, 300, 400, 500, 600, 700, 800, 900, 1000, 1100, 1200, 1300, 1400, 1500, 1600, 1700, 1800, 1900, 2000 or more nucleotides 5′ or 3′ to the target sequence in the target gene, thereby reducing or silencing expression of the target gene.

[0210] In some embodiments, an effector domain alters a chemical modification state, e.g., DNA methylation, of one or more nucleotides or one or more histone residues bound to one or more nucleotides within 10, 20, 30, 40, 50, 60, 70, 80, 90, 100, 200, 300, 400, 500 nucleotides flanking the target sequence, and the altered chemical modification state subsequently spreads to nucleotides 100, 200, 300, 400, 500, 600, 700, 800, 900, 1000, 1100, 1200, 1300, 1400, 1500, 1600, 1700, 1800, 1900, 2000 or more nucleotides 5′ or 3′ to the target sequence in the target gene, thereby reducing or silencing expression of the target gene.

[0211] In some embodiments, an effector domain alters a chemical modification state of a nucleotide 100-200 nucleotides 5′ to the target sequence in the target gene, thereby reducing or silencing expression of the target gene. In some embodiments, an effector domain alters a chemical modification state of a nucleotide 200-300 nucleotides 5′ to the target sequence in the target gene, thereby reducing or silencing expression of the target gene. In some embodiments, an effector domain alters a chemical modification state of a nucleotide 300-400 nucleotides 5′ to the target sequence in the target gene, thereby reducing or silencing expression of the target gene. In some embodiments, an effector domain alters a chemical modification state of a nucleotide 400-500 nucleotides 5′ to the target sequence in the target gene, thereby reducing or silencing expression of the target gene. In some embodiments, an effector domain alters a chemical modification state of a nucleotide 500-600 nucleotides 5′ to the target sequence in the target gene, thereby reducing or silencing expression of the target gene. In some embodiments, an effector domain alters a chemical modification state of a nucleotide 600-700 nucleotides 5′ to the target sequence in the target gene, thereby reducing or silencing expression of the target gene. In some embodiments, an effector domain alters a chemical modification state of a nucleotide 700-800 nucleotides 5′ to the target sequence in the target gene, thereby reducing or silencing expression of the target gene.

[0212] In some embodiments, an effector domain alters a chemical modification state of a nucleotide 50, 60, 70, 80, 90, 100, 200, 300, 400, 500, 600, 700, 800, 900, 1000 or more nucleotides 5′ or 3′ to the target sequence in the target gene, thereby reducing or silencing expression of the target gene. In some embodiments, an effector domain initiates alteration of a chemical modification state, e.g. DNA methylation, of one or more nucleotides or one or more histone residues bound to one or more nucleotides within 10, 20, 30, 40, 50, 60, 70, 80, 90, 100, 200, 300, 400, 500 nucleotides flanking the target sequence, and the chemical modification state alteration spreads to one or more nucleotides at least 500, 600, 700, 800, 900, 1000, 1100, 1200, 1300, 1400, 1500, 1600, 1700, 1800, 1900, 2000 or more nucleotides 3′ to the target sequence in the target gene, thereby increasing or activating expression of the target gene, thereby increasing expression of the target gene.

[0213] In some embodiments, an effector domain alters a chemical modification state of a nucleotide 100-200 nucleotides 3′ to the target sequence in the target gene, thereby reducing or silencing expression of the target gene. In some embodiments, an effector domain alters a chemical modification state of a nucleotide 200-300 nucleotides 3′ to the target sequence in the target gene, thereby reducing or silencing expression of the target gene. In some embodiments, an effector domain alters a chemical modification state of a nucleotide 300-400 nucleotides 3′ to the target sequence in the target gene, thereby reducing or silencing expression of the target gene. In some embodiments, an effector domain alters a chemical modification state of a nucleotide 400-500 nucleotides 3′ to the target sequence in the target gene, thereby reducing or silencing expression of the target gene. In some embodiments, an effector domain alters a chemical modification state of a nucleotide 500-600 nucleotides 3′ to the target sequence in the target gene, thereby reducing or silencing expression of the target gene. In some embodiments, an effector domain alters a chemical modification state of a nucleotide 600-700 nucleotides 3′ to the target sequence in the target gene, thereby reducing or silencing expression of the target gene. In some embodiments, an effector domain alters a chemical modification state of a nucleotide 700-800 nucleotides 3′ to the target sequence in the target gene, thereby reducing or silencing expression of the target gene. In some embodiments, the chemical modification state is a methylation state. In some embodiments, the effector domain of an epigenetic effector results in methylation of one or more nucleotides in the target gene, thereby reducing or silencing expression of the target gene. In some embodiments, an effector domain initiates alteration of a chemical modification state, e.g. DNA methylation, of one or more nucleotides or one or more histone residues bound to one or more nucleotides within 10, 20, 30, 40, 50, 60, 70, 80, 90, 100, 200, 300, 400, 500 nucleotides flanking the target sequence, and the chemical modification state alteration spreads to one or more nucleotides at least 500, 600, 700, 800, 900, 1000, 1100, 1200, 1300, 1400, 1500, 1600, 1700, 1800, 1900, 2000 or more nucleotides 5′ to the target sequence in the target gene, thereby increasing or activating expression of the target gene, thereby increasing expression of the target gene.

[0214] In some embodiments, an effector domain alters a histone modification state of a histone associated with or bound to the target gene. For example, an effector domain may deposit a modification on one or more lysine residues of histone tails of histones associated with the target gene. The histone amino acid residues modified may be within the vicinity of the target sequence within the target gene. In some embodiments, an effector domain alters a histone modification state 50, 60, 70, 80, 90, 100, 200, 300, 400, 500, 600, 700, 800, 900, 1000 or more nucleotides 5′ or 3′ to the target sequence in the target gene, thereby reducing or silencing expression of the target gene. In some embodiments, an effector domain alters a histone modification state 100-200 nucleotides 5′ to the target sequence in the target gene, thereby reducing or silencing expression of the target gene. In some embodiments, an effector domain alters a histone modification state 200-300 nucleotides 5′ to the target sequence in the target gene, thereby reducing or silencing expression of the target gene. In some embodiments, an effector domain alters a histone modification state 300-400 nucleotides 5′ to the target sequence in the target gene, thereby reducing or silencing expression of the target gene. In some embodiments, an effector domain alters a histone modification state 400-500 nucleotides 5′ to the target sequence in the target gene, thereby reducing or silencing expression of the target gene. In some embodiments, an effector domain alters a histone modification state 500-600 nucleotides 5′ to the target sequence in the target gene, thereby reducing or silencing expression of the target gene. In some embodiments, an effector domain alters a histone modification state 600-700 nucleotides 5′ to the target sequence in the target gene, thereby reducing or silencing expression of the target gene. In some embodiments, an effector domain alters a histone modification state 700-800 nucleotides 5′ to the target sequence in the target gene, thereby reducing or silencing expression of the target gene. In some embodiments, an effector domain alters a histone modification state 50, 60, 70, 80, 90, 100, 200, 300, 400, 500, 600, 700, 800, 900, 1000 or more nucleotides 5′ or 3′ to the target sequence in the target gene, thereby reducing or silencing expression of the target gene. In some embodiments, an effector domain alters a histone modification state 100-200 nucleotides 3′ to the target sequence in the target gene, thereby reducing or silencing expression of the target gene. In some embodiments, an effector domain alters a histone modification state 200-300 nucleotides 3′ to the target sequence in the target gene, thereby reducing or silencing expression of the target gene. In some embodiments, an effector domain alters a histone modification state 300-400 nucleotides 3′ to the target sequence in the target gene, thereby reducing or silencing expression of the target gene. In some embodiments, an effector domain alters a histone modification state 400-500 nucleotides 3′ to the target sequence in the target gene, thereby reducing or silencing expression of the target gene. In some embodiments, an effector domain alters a histone modification state 500-600 nucleotides 3′ to the target sequence in the target gene, thereby reducing or silencing expression of the target gene. In some embodiments, an effector domain alters a histone modification state 600-700 nucleotides 3′ to the target sequence in the target gene, thereby reducing or silencing expression of the target gene. In some embodiments, an effector domain alters a histone modification state 700-800 nucleotides 3′ to the target sequence in the target gene, thereby reducing or silencing expression of the target gene. In some embodiments, the histone modification state is a acetylation state. In some embodiments, the effector domain of an epigenetic effector results in de-acetylation of one or more histone tails of histones associated with the target gene, thereby reducing or silencing expression of the target gene. In some embodiments, the histone modification state is a methylation state. In some embodiments, the epigenetic effector results in a H3K9, H3K27 or H4K20 methylation (e.g. one or more of a H3K9me2, H3K9me3, H3K27me2, H3K27me3, and H4K20me3 methylation) at one or more histone tails associated with the target gene, thereby reducing or silencing expression of the target gene.

[0215] In an aspect, also provided herein is an epigenetically edited chromosome or an epigenetically edited genome or cell comprising the epigenetically edited chromosome, wherein one or more target nucleotides in the epigenetically edited chromosome comprises an epigenetic modification mediated or induced by an epigenetic editor provided herein. For example, an epigenetically edited chromosome may comprise one or more methylated nucleotides as compared to a chromosome not contacted with an epigenetic editor. In some embodiments, the epigenetically edited chromosome comprises methylated CpGs. An epigenetically edited chromosome may comprise one or more types of epigenetic modifications as compared to an un-edited control chromosome of the same species, for example, epigenetic modifications to DNA nucleotides or histone tails of the chromosome. In some embodiments, an epigenetically edited chromosome comprises one or more methylated nucleotides as compared to a control chromosome not contacted with the epigenetic editor. In some embodiments, an epigenetically edited chromosome comprises one or more demethylated nucleotides as compared to a control chromosome not contacted with the epigenetic editor. In some embodiments, an epigenetically edited chromosome comprises one or more methylated histone tails as compared to a control chromosome not contacted with the epigenetic editor. In some embodiments, an epigenetically edited chromosome comprises one or more demethylated histone tails as compared to a control chromosome not contacted with the epigenetic editor. In some embodiments, an epigenetically edited chromosome comprises one or more acetylated histone tails as compared to a control chromosome not contacted with the epigenetic editor. In some embodiments, an epigenetically edited chromosome comprises one or more deacetylated histone tails as compared to a control chromosome not contacted with the epigenetic editor. In some embodiments, an epigenetically edited chromosome comprises one or more or any combination of epigenetic modifications, e.g, DNA methylation and histone deacetylation, DNA methylation and histone H3K9 methylation, DNA methylation and histone H3K4 demethylation, DNA demethylation and histone acetylation, DNA demethylation and histone H3K9 demethylation, DNA demethylation and histone H3K4 methylation, in any of the chromosome regions, e.g., chromosome regions as described herein, or any combination thereof. As used herein, a control chromosome may refer to the original epigenetic state, or unedited state, where a chromosome has not been contacted with an epigenetic editor as described herein. In some embodiments, a control chromosome may already bear epigenetic marks, e.g. DNA methylation, without being contacted with an epigenetic editor.

[0216] In some embodiments, all CpG dinucleotides within 2000 bps flanking a transcription start site of a gene in the epigenetically edited chromosome in a cell are methylated as compared to the original state of the gene or the gene in a comparable cell not contacted with the epigenetic editor. In some embodiments, at least 1, 2, 3, 4, 5, 6, 7, 8, 9, 10, 11, 12, 13, 14, 15, 16, 17, 18, 19, 20, 25, 30, 35, 40, 45, 50, 60, 70, 80, 90, 100, 150, 200, 250, 300, 350, 400, 450, 500, 550, 600, 650, 700 or more CpG dinucleotides within 2000 bps flanking a transcription start site of a gene in the epigenetically edited chromosome in a cell are methylated as compared to the original state of the gene or the gene in a comparable cell not contacted with the epigenetic editor. In some embodiments, at least 5%, 6%, 7%, 8%, 9%, 10%, 15%, 20%, 25%, 30%, 35%, 40%, 45%, 50%, 55%, 60%, 65%, 70%, 75%, 80%, 85%, 90%, 95%, 96%, 97%, 98%, or 99% of CpG dinucleotides within 2000 bps flanking a transcription start site of a gene in the epigenetically edited chromosome in a cell are methylated as compared to the original state of the gene or the gene in a comparable cell not contacted with the epigenetic editor. In some embodiments, one single CpG dinucleotide within 2000 bps flanking a transcription start site of a gene in the epigenetically edited chromosome in a cell is methylated as compared to the original state of the gene or the gene in a comparable cell not contacted with the epigenetic editor.

[0217] In some embodiments, all CpG dinucleotides within 2000 bps flanking a transcription start site of a gene in the epigenetically edited chromosome in a cell are demethylated as compared to the original state of the gene or the gene in a comparable cell not contacted with the epigenetic editor. In some embodiments, at least 1, 2, 3, 4, 5, 6, 7, 8, 9, 10, 11, 12, 13, 14, 15, 16, 17, 18, 19, 20, 25, 30, 35, 40, 45, 50, 60, 70, 80, 90, 100, 150, 200, 250, 300, 350, 400, 450, 500, 550, 600, 650, 700 or more CpG dinucleotides within 2000 bps flanking a transcription start site of a gene in the epigenetically edited chromosome in a cell are demethylated as compared to the original state of the gene or the gene in a comparable cell not contacted with the epigenetic editor. In some embodiments, at least 5%, 6%, 7%, 8%, 9%, 10%, 15%, 20%, 25%, 30%, 35%, 40%, 45%, 50%, 55%, 60%, 65%, 70%, 75%, 80%, 85%, 90%, 95%, 96%, 97%, 98%, or 99% of CpG dinucleotides within 2000 bps flanking a transcription start site of a gene in the epigenetically edited chromosome in a cell are demethylated as compared to the original state of the gene or the gene in a comparable cell not contacted with the epigenetic editor. In some embodiments, one single CpG dinucleotide within 2000 bps flanking a transcription start site of a gene in the epigenetically edited chromosome in a cell is demethylated as compared to the original state of the gene or the gene in a comparable cell not contacted with the epigenetic editor.

[0218] In some embodiments, all histone tails of histones bound to DNA nucleotides within 2000 bps flanking a transcription start site of a target gene in the epigenetically edited chromosome in a cell are methylated as compared to the original state of the chromosome or the chromosome in a comparable cell not contacted with the epigenetic editor. In some embodiments, at least 1, 2, 3, 4, 5, 6, 7, 8, 9, 10, 11, 12, 13, 14, 15, 16, 17, 18, 19, 20, 25, 30, 35, 40, 45, 50, 55, 60, 65, 70, 75, 80, 85, 90, 95, 100, 105, 110, 115, 120 or more histone tails of histones bound to DNAs within 2000 bps flanking a transcription start site of a gene in the epigenetically edited chromosome in a cell are methylated as compared to the original state of the chromosome or the chromosome in a comparable cell not contacted with the epigenetic editor. In some embodiments, at least 5%, 6%, 7%, 8%, 9%, 10%, 15%, 20%, 25%, 30%, 35%, 40%, 45%, 50%, 55%, 60%, 65%, 70%, 75%, 80%, 85%, 90%, 95%, 96%, 97%, 98%, or 99% of histone tails of histones bound to DNAs within 2000 bps flanking a transcription start site of a gene in the epigenetically edited chromosome in a cell are methylated as compared to the original state of the chromosome or the chromosome in a comparable cell not contacted with the epigenetic editor. In some embodiments, one single histone tail of histones bound to DNAs within 2000 bps flanking a transcription start site of a gene in the epigenetically edited chromosome in a cell is methylated as compared to the original state of the chromosome or the chromosome in a comparable cell not contacted with the epigenetic editor. In some embodiments, one single histone octamer bound to DNAs within 2000 bps flanking a transcription start site of a gene in the epigenetically edited chromosome in a cell is methylated as compared to the original state of the chromosome or the chromosome in a comparable cell not contacted with the epigenetic editor. In some embodiments, the histone is histone H3 and methylation is at Lysine 9, marking the target gene in the epigenetically edited chromosome for repressed expression. In some embodiments, the histone is histone H3 and methylation is at Lysine 4, marking the target gene in the epigenetically edited chromosome for increased expression.

[0219] In some embodiments, all histone tails of histones bound to DNA nucleotides within 2000 bps flanking a transcription start site of a target gene in the epigenetically edited chromosome in a cell are demethylated as compared to the original state of the chromosome or the chromosome in a comparable cell not contacted with the epigenetic editor. In some embodiments, at least 1, 2, 3, 4, 5, 6, 7, 8, 9, 10, 11, 12, 13, 14, 15, 16, 17, 18, 19, 20, 25, 30, 35, 40, 45, 50, 55, 60, 65, 70, 75, 80, 85, 90, 95, 100, 105, 110, 115, 120 or more histone tails of histones bound to DNAs within 2000 bps flanking a transcription start site of a gene in the epigenetically edited chromosome in a cell are demethylated as compared to the original state of the chromosome or the chromosome in a comparable cell not contacted with the epigenetic editor. In some embodiments, at least 5%, 6%, 7%, 8%, 9%, 10%, 15%, 20%, 25%, 30%, 35%, 40%, 45%, 50%, 55%, 60%, 65%, 70%, 75%, 80%, 85%, 90%, 95%, 96%, 97%, 98%, or 99% of histone tails of histones bound to DNAs within 2000 bps flanking a transcription start site of a gene in the epigenetically edited chromosome in a cell are demethylated as compared to the original state of the chromosome or the chromosome in a comparable cell not contacted with the epigenetic editor. In some embodiments, one single histone tail of histones bound to DNAs within 2000 bps flanking a transcription start site of a gene in the epigenetically edited chromosome in a cell is demethylated as compared to the original state of the chromosome or the chromosome in a comparable cell not contacted with the epigenetic editor. In some embodiments, one single histone octamer bound to DNAs within 2000 bps flanking a transcription start site of a gene in the epigenetically edited chromosome in a cell is demethylated as compared to the original state of the chromosome or the chromosome in a comparable cell not contacted with the epigenetic editor. In some embodiments, the histone is histone H3 and methylation is at Lysine 9, marking the target gene in the epigenetically edited chromosome for repressed expression. In some embodiments, the histone is histone H3 and methylation is at Lysine 4, marking the target gene in the epigenetically edited chromosome for increased expression.

[0220] In some embodiments, all histone tails of histones bound to DNA nucleotides within 2000 bps flanking a transcription start site of a target gene in the epigenetically edited chromosome in a cell are acetylated as compared to the original state of the chromosome or the chromosome in a comparable cell not contacted with the epigenetic editor. In some embodiments, at least 1, 2, 3, 4, 5, 6, 7, 8, 9, 10, 11, 12, 13, 14, 15, 16, 17, 18, 19, 20, 25, 30, 35, 40, 45, 50, 55, 60, 65, 70, 75, 80, 85, 90, 95, 100, 105, 110, 115, 120 or more histone tails of histones bound to DNAs within 2000 bps flanking a transcription start site of a gene in the epigenetically edited chromosome in a cell are acetylated as compared to the original state of the chromosome or the chromosome in a comparable cell not contacted with the epigenetic editor. In some embodiments, at least 5%, 6%, 7%, 8%, 9%, 10%, 15%, 20%, 25%, 30%, 35%, 40%, 45%, 50%, 55%, 60%, 65%, 70%, 75%, 80%, 85%, 90%, 95%, 96%, 97%, 98%, or 99% of histone tails of histones bound to DNAs within 2000 bps flanking a transcription start site of a gene in the epigenetically edited chromosome in a cell are acetylated as compared to the original state of the chromosome or the chromosome in a comparable cell not contacted with the epigenetic editor. In some embodiments, one single histone tail of histones bound to DNAs within 2000 bps flanking a transcription start site of a gene in the epigenetically edited chromosome in a cell is acetylated as compared to the original state of the chromosome or the chromosome in a comparable cell not contacted with the epigenetic editor. In some embodiments, one single histone octamer bound to DNAs within 2000 bps flanking a transcription start site of a gene in the epigenetically edited chromosome in a cell is acetylated as compared to the original state of the chromosome or the chromosome in a comparable cell not contacted with the epigenetic editor.

[0221] In some embodiments, all histone tails of histones bound to DNA nucleotides within 2000 bps flanking a transcription start site of a target gene in the epigenetically edited chromosome in a cell are deacetylated as compared to the original state of the chromosome or the chromosome in a comparable cell not contacted with the epigenetic editor. In some embodiments, at least 1, 2, 3, 4, 5, 6, 7, 8, 9, 10, 11, 12, 13, 14, 15, 16, 17, 18, 19, 20, 25, 30, 35, 40, 45, 50, 55, 60, 65, 70, 75, 80, 85, 90, 95, 100, 105, 110, 115, 120 or more histone tails of histones bound to DNAs within 2000 bps flanking a transcription start site of a gene in the epigenetically edited chromosome in a cell are deacetylated as compared to the original state of the chromosome or the chromosome in a comparable cell not contacted with the epigenetic editor. In some embodiments, at least 5%, 6%, 7%, 8%, 9%, 10%, 15%, 20%, 25%, 30%, 35%, 40%, 45%, 50%, 55%, 60%, 65%, 70%, 75%, 80%, 85%, 90%, 95%, 96%, 97%, 98%, or 99% of histone tails of histones bound to DNAs within 2000 bps flanking a transcription start site of a gene in the epigenetically edited chromosome in a cell are deacetylated as compared to the original state of the chromosome or the chromosome in a comparable cell not contacted with the epigenetic editor. In some embodiments, one single histone tail of histones bound to DNAs within 2000 bps flanking a transcription start site of a gene in the epigenetically edited chromosome in a cell is deacetylated as compared to the original state of the chromosome or the chromosome in a comparable cell not contacted with the epigenetic editor. In some embodiments, one single histone octamer bound to DNAs within 2000 bps flanking a transcription start site of a gene in the epigenetically edited chromosome in a cell is deacetylated as compared to the original state of the chromosome or the chromosome in a comparable cell not contacted with the epigenetic editor. In some embodiments, all CpG dinucleotides within 1500 bp flanking a transcription start site of a gene in the epigenetically edited chromosome in a cell are methylated as compared to the original state of the gene or the gene in a comparable cell not contacted with the epigenetic editor. In some embodiments, at least 1, 2, 3, 4, 5, 6, 7, 8, 9, 10, 11, 12, 13, 14, 15, 16, 17, 18, 19, 20, 25, 30, 35, 40, 45, 50, 60, 70, 80, 90, 100, 150, 200, 250, 300, 350, 400, 450, 550, 500, 600, 650, 700 or more CpG dinucleotides within 1500 bps flanking a transcription start site of a gene in the epigenetically edited chromosome in a cell are methylated as compared to the original state of the gene or the gene in a comparable cell not contacted with the epigenetic editor. In some embodiments, at least 5%, 6%, 7%, 8%, 9%, 10%, 15%, 20%, 25%, 30%, 35%, 40%, 45%, 50%, 55%, 60%, 65%, 70%, 75%, 80%, 85%, 90%, 95%, 96%, 97%, 98%, or 99% of CpG dinucleotides within 1500 bps flanking a transcription start site of a gene in the epigenetically edited chromosome in a cell are methylated as compared to the original state of the gene or the gene in a comparable cell not contacted with the epigenetic editor. In some embodiments, one single CpG dinucleotide within 1500 bps flanking a transcription start site of a gene in the epigenetically edited chromosome in a cell is methylated as compared to the original state of the gene or the gene in a comparable cell not contacted with the epigenetic editor.

[0222] In some embodiments, all CpG dinucleotides within 1500 bps flanking a transcription start site of a gene in the epigenetically edited chromosome in a cell are demethylated as compared to the original state of the gene or the gene in a comparable cell not contacted with the epigenetic editor. In some embodiments, at least 1, 2, 3, 4, 5, 6, 7, 8, 9, 10, 11, 12, 13, 14, 15, 16, 17, 18, 19, 20, 25, 30, 35, 40, 45, 50, 60, 70, 80, 90, 100, 150, 200, 250, 300, 350, 400, 450, 500, 550, 600, 650, 700 or more CpG dinucleotides within 1500 bps flanking a transcription start site of a gene in the epigenetically edited chromosome in a cell are demethylated as compared to the original state of the gene or the gene in a comparable cell not contacted with the epigenetic editor. In some embodiments, at least 5%, 6%, 7%, 8%, 9%, 10%, 15%, 20%, 25%, 30%, 35%, 40%, 45%, 50%, 55%, 60%, 65%, 70%, 75%, 80%, 85%, 90%, 95%, 96%, 97%, 98%, or 99% of CpG dinucleotides within 1500 bps flanking a transcription start site of a gene in the epigenetically edited chromosome in a cell are demethylated as compared to the original state of the gene or the gene in a comparable cell not contacted with the epigenetic editor. In some embodiments, one single CpG dinucleotide within 1500 bps flanking a transcription start site of a gene in the epigenetically edited chromosome in a cell is demethylated as compared to the original state of the gene or the gene in a comparable cell not contacted with the epigenetic editor.

[0223] In some embodiments, all histone tails of histones bound to DNA nucleotides within 1500 bps flanking a transcription start site of a target gene in the epigenetically edited chromosome in a cell are methylated as compared to the original state of the chromosome or the chromosome in a comparable cell not contacted with the epigenetic editor. In some embodiments, at least 1, 2, 3, 4, 5, 6, 7, 8, 9, 10, 11, 12, 13, 14, 15, 16, 17, 18, 19, 20, 25, 30, 35, 40, 45, 50, 55, 60, 65, 70, 75, 80, 85, 90 or more histone tails of histones bound to DNAs within 1500 bps flanking a transcription start site of a gene in the epigenetically edited chromosome in a cell are methylated as compared to the original state of the chromosome or the chromosome in a comparable cell not contacted with the epigenetic editor. In some embodiments, at least 5%, 6%, 7%, 8%, 9%, 10%, 15%, 20%, 25%, 30%, 35%, 40%, 45%, 50%, 55%, 60%, 65%, 70%, 75%, 80%, 85%, 90%, 95%, 96%, 97%, 98%, or 99% of histone tails of histones bound to DNAs within 1500 bps flanking a transcription start site of a gene in the epigenetically edited chromosome in a cell are methylated as compared to the original state of the chromosome or the chromosome in a comparable cell not contacted with the epigenetic editor. In some embodiments, one single histone tail of histones bound to DNAs within 1500 bps flanking a transcription start site of a gene in the epigenetically edited chromosome in a cell is methylated as compared to the original state of the chromosome or the chromosome in a comparable cell not contacted with the epigenetic editor. In some embodiments, one single histone octamer bound to DNAs within 1500 bps flanking a transcription start site of a gene in the epigenetically edited chromosome in a cell is methylated as compared to the original state of the chromosome or the chromosome in a comparable cell not contacted with the epigenetic editor. In some embodiments, the histone is histone H3 and methylation is at Lysine 9, marking the target gene in the epigenetically edited chromosome for repressed expression. In some embodiments, the histone is histone H3 and methylation is at Lysine 4, marking the target gene in the epigenetically edited chromosome for increased expression.

[0224] In some embodiments, all histone tails of histones bound to DNA nucleotides within 1500 bps flanking a transcription start site of a target gene in the epigenetically edited chromosome in a cell are demethylated as compared to the original state of the chromosome or the chromosome in a comparable cell not contacted with the epigenetic editor. In some embodiments, at least 1, 2, 3, 4, 5, 6, 7, 8, 9, 10, 11, 12, 13, 14, 15, 16, 17, 18, 19, 20, 25, 30, 35, 40, 45, 50, 55, 60, 65, 70, 75, 80, 85, 90 or more histone tails of histones bound to DNAs within 1500 bps flanking a transcription start site of a gene in the epigenetically edited chromosome in a cell are demethylated as compared to the original state of the chromosome or the chromosome in a comparable cell not contacted with the epigenetic editor. In some embodiments, at least 5%, 6%, 7%, 8%, 9%, 10%, 15%, 20%, 25%, 30%, 35%, 40%, 45%, 50%, 55%, 60%, 65%, 70%, 75%, 80%, 85%, 90%, 95%, 96%, 97%, 98%, or 99% of histone tails of histones bound to DNAs within 1500 bps flanking a transcription start site of a gene in the epigenetically edited chromosome in a cell are demethylated as compared to the original state of the chromosome or the chromosome in a comparable cell not contacted with the epigenetic editor. In some embodiments, one single histone tail of histones bound to DNAs within 1500 bps flanking a transcription start site of a gene in the epigenetically edited chromosome in a cell is demethylated as compared to the original state of the chromosome or the chromosome in a comparable cell not contacted with the epigenetic editor. In some embodiments, one single histone octamer bound to DNAs within 1500 bps flanking a transcription start site of a gene in the epigenetically edited chromosome in a cell is demethylated as compared to the original state of the chromosome or the chromosome in a comparable cell not contacted with the epigenetic editor. In some embodiments, the histone is histone H3 and methylation is at Lysine 9, marking the target gene in the epigenetically edited chromosome for repressed expression. In some embodiments, the histone is histone H3 and methylation is at Lysine 4, marking the target gene in the epigenetically edited chromosome for increased expression.

[0225] In some embodiments, all histone tails of histones bound to DNA nucleotides within 1500 bps flanking a transcription start site of a target gene in the epigenetically edited chromosome in a cell are acetylated as compared to the original state of the chromosome or the chromosome in a comparable cell not contacted with the epigenetic editor. In some embodiments, at least 1, 2, 3, 4, 5, 6, 7, 8, 9, 10, 11, 12, 13, 14, 15, 16, 17, 18, 19, 20, 25, 30, 35, 40, 45, 50, 55, 60, 65, 70, 75, 80, 85, 90 or more histone tails of histones bound to DNAs within 1500 bps flanking a transcription start site of a gene in the epigenetically edited chromosome in a cell are acetylated as compared to the original state of the chromosome or the chromosome in a comparable cell not contacted with the epigenetic editor. In some embodiments, at least 5%, 6%, 7%, 8%, 9%, 10%, 15%, 20%, 25%, 30%, 35%, 40%, 45%, 50%, 55%, 60%, 65%, 70%, 75%, 80%, 85%, 90%, 95%, 96%, 97%, 98%, or 99% of histone tails of histones bound to DNAs within 1500 bps flanking a transcription start site of a gene in the epigenetically edited chromosome in a cell are acetylated as compared to the original state of the chromosome or the chromosome in a comparable cell not contacted with the epigenetic editor. In some embodiments, one single histone tail of histones bound to DNAs within 1500 bps flanking a transcription start site of a gene in the epigenetically edited chromosome in a cell is acetylated as compared to the original state of the chromosome or the chromosome in a comparable cell not contacted with the epigenetic editor. In some embodiments, one single histone octamer bound to DNAs within 1500 bps flanking a transcription start site of a gene in the epigenetically edited chromosome in a cell is acetylated as compared to the original state of the chromosome or the chromosome in a comparable cell not contacted with the epigenetic editor.

[0226] In some embodiments, all histone tails of histones bound to DNA nucleotides within 1500 bps flanking a transcription start site of a target gene in the epigenetically edited chromosome in a cell are deacetylated as compared to the original state of the chromosome or the chromosome in a comparable cell not contacted with the epigenetic editor. In some embodiments, at least 1, 2, 3, 4, 5, 6, 7, 8, 9, 10, 11, 12, 13, 14, 15, 16, 17, 18, 19, 20, 25, 30, 35, 40, 45, 50, 55, 60, 65, 70, 75, 80, 85, 90 or more histone tails of histones bound to DNAs within 1500 bps flanking a transcription start site of a gene in the epigenetically edited chromosome in a cell are deacetylated as compared to the original state of the chromosome or the chromosome in a comparable cell not contacted with the epigenetic editor. In some embodiments, at least 5%, 6%, 7%, 8%, 9%, 10%, 15%, 20%, 25%, 30%, 35%, 40%, 45%, 50%, 55%, 60%, 65%, 70%, 75%, 80%, 85%, 90%, 95%, 96%, 97%, 98%, or 99% of histone tails of histones bound to DNAs within 1500 bps flanking a transcription start site of a gene in the epigenetically edited chromosome in a cell are deacetylated as compared to the original state of the chromosome or the chromosome in a comparable cell not contacted with the epigenetic editor. In some embodiments, one single histone tail of histones bound to DNAs within 1500 bps flanking a transcription start site of a gene in the epigenetically edited chromosome in a cell is deacetylated as compared to the original state of the chromosome or the chromosome in a comparable cell not contacted with the epigenetic editor. In some embodiments, one single histone octamer bound to DNAs within 1500 bps flanking a transcription start site of a gene in the epigenetically edited chromosome in a cell is deacetylated as compared to the original state of the chromosome or the chromosome in a comparable cell not contacted with the epigenetic editor. In some embodiments, all CpG dinucleotides within 1000 bps flanking a transcription start site of a gene in the epigenetically edited chromosome in a cell are methylated as compared to the original state of the gene or the gene in a comparable cell not contacted with the epigenetic editor. In some embodiments, at least 1, 2, 3, 4, 5, 6, 7, 8, 9, 10, 11, 12, 13, 14, 15, 16, 17, 18, 19, 20, 25, 30, 35, 40, 45, 50, 60, 70, 80, 90, 100, 150, 200, 250, 300, 350, 400, 450, 500 or more CpG dinucleotides within 1000 bps flanking a transcription start site of a gene in the epigenetically edited chromosome in a cell are methylated as compared to the original state of the gene or the gene in a comparable cell not contacted with the epigenetic editor. In some embodiments, at least 5%, 6%, 7%, 8%, 9%, 10%, 15%, 20%, 25%, 30%, 35%, 40%, 45%, 50%, 55%, 60%, 65%, 70%, 75%, 80%, 85%, 90%, 95%, 96%, 97%, 98%, or 99% of CpG dinucleotides within 1000 bps flanking a transcription start site of a gene in the epigenetically edited chromosome in a cell are methylated as compared to the original state of the gene or the gene in a comparable cell not contacted with the epigenetic editor. In some embodiments, one single CpG dinucleotide within 1000 bps flanking a transcription start site of a gene in the epigenetically edited chromosome in a cell is methylated as compared to the original state of the gene or the gene in a comparable cell not contacted with the epigenetic editor.

[0227] In some embodiments, all CpG dinucleotides within 1000 bps flanking a transcription start site of a gene in the epigenetically edited chromosome in a cell are demethylated as compared to the original state of the gene or the gene in a comparable cell not contacted with the epigenetic editor. In some embodiments, at least 1, 2, 3, 4, 5, 6, 7, 8, 9, 10, 11, 12, 13, 14, 15, 16, 17, 18, 19, 20, 25, 30, 35, 40, 45, 50, 60, 70, 80, 90, 100, 150, 200, 250, 300, 350, 400, 450, 500 or more CpG dinucleotides within 1000 bps flanking a transcription start site of a gene in the epigenetically edited chromosome in a cell are demethylated as compared to the original state of the gene or the gene in a comparable cell not contacted with the epigenetic editor. In some embodiments, at least 5%, 6%, 7%, 8%, 9%, 10%, 15%, 20%, 25%, 30%, 35%, 40%, 45%, 50%, 55%, 60%, 65%, 70%, 75%, 80%, 85%, 90%, 95%, 96%, 97%, 98%, or 99% of CpG dinucleotides within 1000 bps flanking a transcription start site of a gene in the epigenetically edited chromosome in a cell are demethylated as compared to the original state of the gene or the gene in a comparable cell not contacted with the epigenetic editor. In some embodiments, one single CpG dinucleotide within 1000 bps flanking a transcription start site of a gene in the epigenetically edited chromosome in a cell is demethylated as compared to the original state of the gene or the gene in a comparable cell not contacted with the epigenetic editor.

[0228] In some embodiments, all histone tails of histones bound to DNA nucleotides within 1000 bps flanking a transcription start site of a target gene in the epigenetically edited chromosome in a cell are methylated as compared to the original state of the chromosome or the chromosome in a comparable cell not contacted with the epigenetic editor. In some embodiments, at least 1, 2, 3, 4, 5, 6, 7, 8, 9, 10, 11, 12, 13, 14, 15, 16, 17, 18, 19, 20, 25, 30, 35, 40, 45, 50, 55, 60 or more histone tails of histones bound to DNAs within 1000 bps flanking a transcription start site of a gene in the epigenetically edited chromosome in a cell are methylated as compared to the original state of the chromosome or the chromosome in a comparable cell not contacted with the epigenetic editor. In some embodiments, at least 5%, 6%, 7%, 8%, 9%, 10%, 15%, 20%, 25%, 30%, 35%, 40%, 45%, 50%, 55%, 60%, 65%, 70%, 75%, 80%, 85%, 90%, 95%, 96%, 97%, 98%, or 99% of histone tails of histones bound to DNAs within 1000 bps flanking a transcription start site of a gene in the epigenetically edited chromosome in a cell are methylated as compared to the original state of the chromosome or the chromosome in a comparable cell not contacted with the epigenetic editor. In some embodiments, one single histone tail of histones bound to DNAs within 1000 bps flanking a transcription start site of a gene in the epigenetically edited chromosome in a cell is methylated as compared to the original state of the chromosome or the chromosome in a comparable cell not contacted with the epigenetic editor. In some embodiments, one single histone octamer bound to DNAs within 1000 bps flanking a transcription start site of a gene in the epigenetically edited chromosome in a cell is methylated as compared to the original state of the chromosome or the chromosome in a comparable cell not contacted with the epigenetic editor. In some embodiments, the histone is histone H3 and methylation is at Lysine 9, marking the target gene in the epigenetically edited chromosome for repressed expression. In some embodiments, the histone is histone H3 and methylation is at Lysine 4, marking the target gene in the epigenetically edited chromosome for increased expression.

[0229] In some embodiments, all histone tails of histones bound to DNA nucleotides within 1000 bps flanking a transcription start site of a target gene in the epigenetically edited chromosome in a cell are demethylated as compared to the original state of the chromosome or the chromosome in a comparable cell not contacted with the epigenetic editor. In some embodiments, at least 1, 2, 3, 4, 5, 6, 7, 8, 9, 10, 11, 12, 13, 14, 15, 16, 17, 18, 19, 20, 25, 30, 35, 40, 45, 50, 55, 60 or more histone tails of histones bound to DNAs within 1000 bps flanking a transcription start site of a gene in the epigenetically edited chromosome in a cell are demethylated as compared to the original state of the chromosome or the chromosome in a comparable cell not contacted with the epigenetic editor. In some embodiments, at least 5%, 6%, 7%, 8%, 9%, 10%, 15%, 20%, 25%, 30%, 35%, 40%, 45%, 50%, 55%, 60%, 65%, 70%, 75%, 80%, 85%, 90%, 95%, 96%, 97%, 98%, or 99% of histone tails of histones bound to DNAs within 1000 bps flanking a transcription start site of a gene in the epigenetically edited chromosome in a cell are demethylated as compared to the original state of the chromosome or the chromosome in a comparable cell not contacted with the epigenetic editor. In some embodiments, one single histone tail of histones bound to DNAs within 1000 bps flanking a transcription start site of a gene in the epigenetically edited chromosome in a cell is demethylated as compared to the original state of the chromosome or the chromosome in a comparable cell not contacted with the epigenetic editor. In some embodiments, one single histone octamer bound to DNAs within 1000 bps flanking a transcription start site of a gene in the epigenetically edited chromosome in a cell is demethylated as compared to the original state of the chromosome or the chromosome in a comparable cell not contacted with the epigenetic editor. In some embodiments, the histone is histone H3 and methylation is at Lysine 9, marking the target gene in the epigenetically edited chromosome for repressed expression. In some embodiments, the histone is histone H3 and methylation is at Lysine 4, marking the target gene in the epigenetically edited chromosome for increased expression.

[0230] In some embodiments, all histone tails of histones bound to DNA nucleotides within 1000 bps flanking a transcription start site of a target gene in the epigenetically edited chromosome in a cell are acetylated as compared to the original state of the chromosome or the chromosome in a comparable cell not contacted with the epigenetic editor. In some embodiments, at least 1, 2, 3, 4, 5, 6, 7, 8, 9, 10, 11, 12, 13, 14, 15, 16, 17, 18, 19, 20, 25, 30, 35, 40, 45, 50, 55, 60 or more histone tails of histones bound to DNAs within 1000 bps flanking a transcription start site of a gene in the epigenetically edited chromosome in a cell are acetylated as compared to the original state of the chromosome or the chromosome in a comparable cell not contacted with the epigenetic editor. In some embodiments, at least 5%, 6%, 7%, 8%, 9%, 10%, 15%, 20%, 25%, 30%, 35%, 40%, 45%, 50%, 55%, 60%, 65%, 70%, 75%, 80%, 85%, 90%, 95%, 96%, 97%, 98%, or 99% of histone tails of histones bound to DNAs within 1000 bps flanking a transcription start site of a gene in the epigenetically edited chromosome in a cell are acetylated as compared to the original state of the chromosome or the chromosome in a comparable cell not contacted with the epigenetic editor. In some embodiments, one single histone tail of histones bound to DNAs within 1000 bps flanking a transcription start site of a gene in the epigenetically edited chromosome in a cell is acetylated as compared to the original state of the chromosome or the chromosome in a comparable cell not contacted with the epigenetic editor. In some embodiments, one single histone octamer bound to DNAs within 1000 bps flanking a transcription start site of a gene in the epigenetically edited chromosome in a cell is acetylated as compared to the original state of the chromosome or the chromosome in a comparable cell not contacted with the epigenetic editor.

[0231] In some embodiments, all histone tails of histones bound to DNA nucleotides within 1000 bps flanking a transcription start site of a target gene in the epigenetically edited chromosome in a cell are deacetylated as compared to the original state of the chromosome or the chromosome in a comparable cell not contacted with the epigenetic editor. In some embodiments, at least 1, 2, 3, 4, 5, 6, 7, 8, 9, 10, 11, 12, 13, 14, 15, 16, 17, 18, 19, 20, 25, 30, 35, 40, 45, 50, 55, 60 or more histone tails of histones bound to DNAs within 1000 bps flanking a transcription start site of a gene in the epigenetically edited chromosome in a cell are deacetylated as compared to the original state of the chromosome or the chromosome in a comparable cell not contacted with the epigenetic editor. In some embodiments, at least 5%, 6%, 7%, 8%, 9%, 10%, 15%, 20%, 25%, 30%, 35%, 40%, 45%, 50%, 55% 60%, 65%, 70%, 75%, 80%, 85%, 90%, 95%, 96%, 97%, 98%, or 99% of histone tails of histones bound to DNAs within 1000 bps flanking a transcription start site of a gene in the epigenetically edited chromosome in a cell are deacetylated as compared to the original state of the chromosome or the chromosome in a comparable cell not contacted with the epigenetic editor. In some embodiments, one single histone tail of histones bound to DNAs within 1000 bps flanking a transcription start site of a gene in the epigenetically edited chromosome in a cell is deacetylated as compared to the original state of the chromosome or the chromosome in a comparable cell not contacted with the epigenetic editor. In some embodiments, one single histone octamer bound to DNAs within 1000 bps flanking a transcription start site of a gene in the epigenetically edited chromosome in a cell is deacetylated as compared to the original state of the chromosome or the chromosome in a comparable cell not contacted with the epigenetic editor. In some embodiments, all CpG dinucleotides within 500 bps flanking a transcription start site of a gene in the epigenetically edited chromosome in a cell are methylated as compared to the original state of the gene or the gene in a comparable cell not contacted with the epigenetic editor. In some embodiments, at least 1, 2, 3, 4, 5, 6, 7, 8, 9, 10, 11, 12, 13, 14, 15, 16, 17, 18, 19, 20, 25, 30, 35, 40, 45, 50, 60, 70, 80, 90, 100, 150, 200 or more CpG dinucleotides within 500 bps flanking a transcription start site of a gene in the epigenetically edited chromosome in a cell are methylated as compared to the original state of the gene or the gene in a comparable cell not contacted with the epigenetic editor. In some embodiments, at least 5%, 6%, 7%, 8%, 9%, 10%, 15%, 20%, 25%, 30%, 35%, 40%, 45%, 50%, 55%, 60%, 65%, 70%, 75%, 80%, 85%, 90%, 95%, 96%, 97%, 98%, or 99% of CpG dinucleotides within 500 bps flanking a transcription start site of a gene in the epigenetically edited chromosome in a cell are methylated as compared to the original state of the gene or the gene in a comparable cell not contacted with the epigenetic editor. In some embodiments, one single CpG dinucleotide within 500 bps flanking a transcription start site of a gene in the epigenetically edited chromosome in a cell is methylated as compared to the original state of the gene or the gene in a comparable cell not contacted with the epigenetic editor.

[0232] In some embodiments, all CpG dinucleotides within 500 bps flanking a transcription start site of a gene in the epigenetically edited chromosome in a cell are demethylated as compared to the original state of the gene or the gene in a comparable cell not contacted with the epigenetic editor. In some embodiments, at least 1, 2, 3, 4, 5, 6, 7, 8, 9, 10, 11, 12, 13, 14, 15, 16, 17, 18, 19, 20, 25, 30, 35, 40, 45, 50, 60, 70, 80, 90, 100, 150, 200 or more CpG dinucleotides within 500 bps flanking a transcription start site of a gene in the epigenetically edited chromosome in a cell are demethylated as compared to the original state of the gene or the gene in a comparable cell not contacted with the epigenetic editor. In some embodiments, at least 5%, 6%, 7%, 8%, 9%, 10%, 15%, 20%, 25%, 30%, 35%, 40%, 45%, 50%, 55%, 60%, 65%, 70%, 75%, 80%, 85%, 90%, 95%, 96%, 97%, 98%, or 99% of CpG dinucleotides within 500 bps flanking a transcription start site of a gene in the epigenetically edited chromosome in a cell are demethylated as compared to the original state of the gene or the gene in a comparable cell not contacted with the epigenetic editor. In some embodiments, one single CpG dinucleotide within 500 bps flanking a transcription start site of a gene in the epigenetically edited chromosome in a cell is demethylated as compared to the original state of the gene or the gene in a comparable cell not contacted with the epigenetic editor.

[0233] In some embodiments, all histone tails of histones bound to DNA nucleotides within 500 bps flanking a transcription start site of a target gene in the epigenetically edited chromosome in a cell are methylated as compared to the original state of the chromosome or the chromosome in a comparable cell not contacted with the epigenetic editor. In some embodiments, at least 1, 2, 3, 4, 5, 6, 7, 8, 9, 10, 11, 12, 13, 14, 15, 16, 17, 18, 19, 20, 25, 30 or more histone tails of histones bound to DNAs within 500 bps flanking a transcription start site of a gene in the epigenetically edited chromosome in a cell are methylated as compared to the original state of the chromosome or the chromosome in a comparable cell not contacted with the epigenetic editor. In some embodiments, at least 5%, 6%, 7%, 8%, 9%, 10%, 15%, 20%, 25%, 30%, 35%, 40%, 45%, 50%, 55%, 60%, 65%, 70%, 75%, 80%, 85%, 90%, 95%, 96%, 97%, 98%, or 99% of histone tails of histones bound to DNAs within 500 bps flanking a transcription start site of a gene in the epigenetically edited chromosome in a cell are methylated as compared to the original state of the chromosome or the chromosome in a comparable cell not contacted with the epigenetic editor. In some embodiments, one single histone tail of histones bound to DNAs within 500 bps flanking a transcription start site of a gene in the epigenetically edited chromosome in a cell is methylated as compared to the original state of the chromosome or the chromosome in a comparable cell not contacted with the epigenetic editor. In some embodiments, one single histone octamer bound to DNAs within 500 bps flanking a transcription start site of a gene in the epigenetically edited chromosome in a cell is methylated as compared to the original state of the chromosome or the chromosome in a comparable cell not contacted with the epigenetic editor. In some embodiments, the histone is histone H3 and methylation is at Lysine 9, marking the target gene in the epigenetically edited chromosome for repressed expression. In some embodiments, the histone is histone H3 and methylation is at Lysine 4, marking the target gene in the epigenetically edited chromosome for increased expression.

[0234] In some embodiments, all histone tails of histones bound to DNA nucleotides within 500 bps flanking a transcription start site of a target gene in the epigenetically edited chromosome in a cell are demethylated as compared to the original state of the chromosome or the chromosome in a comparable cell not contacted with the epigenetic editor. In some embodiments, at least 1, 2, 3, 4, 5, 6, 7, 8, 9, 10, 11, 12, 13, 14, 15, 16, 17, 18, 19, 20, 25, 30 or more histone tails of histones bound to DNAs within 500 bps flanking a transcription start site of a gene in the epigenetically edited chromosome in a cell are demethylated as compared to the original state of the chromosome or the chromosome in a comparable cell not contacted with the epigenetic editor. In some embodiments, at least 5%, 6%, 7%, 8%, 9%, 10%, 15%, 20%, 25%, 30%, 35%, 40%, 45%, 50%, 55%, 60%, 65%, 70%, 75%, 80%, 85%, 90%, 95%, 96%, 97%, 98%, or 99% of histone tails of histones bound to DNAs within 500 bps flanking a transcription start site of a gene in the epigenetically edited chromosome in a cell are demethylated as compared to the original state of the chromosome or the chromosome in a comparable cell not contacted with the epigenetic editor. In some embodiments, one single histone tail of histones bound to DNAs within 500 bps flanking a transcription start site of a gene in the epigenetically edited chromosome in a cell is demethylated as compared to the original state of the chromosome or the chromosome in a comparable cell not contacted with the epigenetic editor. In some embodiments, one single histone octamer bound to DNAs within 500 bps flanking a transcription start site of a gene in the epigenetically edited chromosome in a cell is demethylated as compared to the original state of the chromosome or the chromosome in a comparable cell not contacted with the epigenetic editor. In some embodiments, the histone is histone H3 and methylation is at Lysine 9, marking the target gene in the epigenetically edited chromosome for repressed expression. In some embodiments, the histone is histone H3 and methylation is at Lysine 4, marking the target gene in the epigenetically edited chromosome for increased expression.

[0235] In some embodiments, all histone tails of histones bound to DNA nucleotides within 500 bps flanking a transcription start site of a target gene in the epigenetically edited chromosome in a cell are acetylated as compared to the original state of the chromosome or the chromosome in a comparable cell not contacted with the epigenetic editor. In some embodiments, at least 1, 2, 3, 4, 5, 6, 7, 8, 9, 10, 11, 12, 13, 14, 15, 16, 17, 18, 19, 20, 25, 30 or more histone tails of histones bound to DNAs within 500 bps flanking a transcription start site of a gene in the epigenetically edited chromosome in a cell are acetylated as compared to the original state of the chromosome or the chromosome in a comparable cell not contacted with the epigenetic editor. In some embodiments, at least 5%, 6%, 7%, 8%, 9%, 10%, 15%, 20%, 25%, 30%, 35%, 40%, 45%, 50%, 55%, 60%, 65%, 70%, 75%, 80%, 85%, 90%, 95%, 96%, 97%, 98%, or 99% of histone tails of histones bound to DNAs within 500 bps flanking a transcription start site of a gene in the epigenetically edited chromosome in a cell are acetylated as compared to the original state of the chromosome or the chromosome in a comparable cell not contacted with the epigenetic editor. In some embodiments, one single histone tail of histones bound to DNAs within 500 bps flanking a transcription start site of a gene in the epigenetically edited chromosome in a cell is acetylated as compared to the original state of the chromosome or the chromosome in a comparable cell not contacted with the epigenetic editor. In some embodiments, one single histone octamer bound to DNAs within 500 bps flanking a transcription start site of a gene in the epigenetically edited chromosome in a cell is acetylated as compared to the original state of the chromosome or the chromosome in a comparable cell not contacted with the epigenetic editor.

[0236] In some embodiments, all histone tails of histones bound to DNA nucleotides within 500 bps flanking a transcription start site of a target gene in the epigenetically edited chromosome in a cell are deacetylated as compared to the original state of the chromosome or the chromosome in a comparable cell not contacted with the epigenetic editor. In some embodiments, at least 1, 2, 3, 4, 5, 6, 7, 8, 9, 10, 11, 12, 13, 14, 15, 16, 17, 18, 19, 20, 25, 30 or more histone tails of histones bound to DNAs within 500 bps flanking a transcription start site of a gene in the epigenetically edited chromosome in a cell are deacetylated as compared to the original state of the chromosome or the chromosome in a comparable cell not contacted with the epigenetic editor. In some embodiments, at least 5%, 6%, 7%, 8%, 9%, 10%, 15%, 20%, 25%, 30%, 35%, 40%, 45%, 50%, 55%, 60%, 65%, 70%, 75%, 80%, 85%, 90%, 95%, 96%, 97%, 98%, or 99% of histone tails of histones bound to DNAs within 500 bps flanking a transcription start site of a gene in the epigenetically edited chromosome in a cell are deacetylated as compared to the original state of the chromosome or the chromosome in a comparable cell not contacted with the epigenetic editor. In some embodiments, one single histone tail of histones bound to DNAs within 500 bps flanking a transcription start site of a gene in the epigenetically edited chromosome in a cell is deacetylated as compared to the original state of the chromosome or the chromosome in a comparable cell not contacted with the epigenetic editor. In some embodiments, one single histone octamer bound to DNAs within 500 bps flanking a transcription start site of a gene in the epigenetically edited chromosome in a cell is deacetylated as compared to the original state of the chromosome or the chromosome in a comparable cell not contacted with the epigenetic editor.

[0237] In some embodiments, all CpG dinucleotides within 200 bps flanking a transcription start site of a gene in the epigenetically edited chromosome in a cell are demethylated as compared to the original state of the gene or the gene in a comparable cell not contacted with the epigenetic editor. In some embodiments, at least 1, 2, 3, 4, 5, 6, 7, 8, 9, 10, 11, 12, 13, 14, 15, 16, 17, 18, 19, 20, 25, 30, 35, 40, 45, 50, 60, 70, 80, 90 or more CpG dinucleotides within 200 bps flanking a transcription start site of a gene in the epigenetically edited chromosome in a cell are demethylated as compared to the original state of the gene or the gene in a comparable cell not contacted with the epigenetic editor. In some embodiments, at least 5%, 6%, 7%, 8%, 9%, 10%, 15%, 20%, 25%, 30%, 35%, 40%, 45%, 50%, 55%, 60%, 65%, 70%, 75%, 80%, 85%, 90%, 95%, 96%, 97%, 98%, or 99% of CpG dinucleotides within 200 bps flanking a transcription start site of a gene in the epigenetically edited chromosome in a cell are demethylated as compared to the original state of the gene or the gene in a comparable cell not contacted with the epigenetic editor. In some embodiments, one single CpG dinucleotide within 200 bps flanking a transcription start site of a gene in the epigenetically edited chromosome in a cell is demethylated as compared to the original state of the gene or the gene in a comparable cell not contacted with the epigenetic editor.

[0238] In some embodiments, all histone tails of histones bound to DNA nucleotides within 200 bps flanking a transcription start site of a target gene in the epigenetically edited chromosome in a cell are methylated as compared to the original state of the chromosome or the chromosome in a comparable cell not contacted with the epigenetic editor. In some embodiments, at least 1, 2, 3, 4, 5, 6, 7, 8, 9, 10, 11, 12, 13, 14, 15, 16, 17, 18, 19, 20 or more histone tails of histones bound to DNAs within 200 bps flanking a transcription start site of a gene in the epigenetically edited chromosome in a cell are methylated as compared to the original state of the chromosome or the chromosome in a comparable cell not contacted with the epigenetic editor. In some embodiments, at least 5%, 6%, 7%, 8%, 9%, 10%, 15%, 20%, 25%, 30%, 35%, 40%, 45%, 50%, 55%, 60%, 65%, 70%, 75%, 80%, 85%, 90%, 95%, 96%, 97%, 98%, or 99% of histone tails of histones bound to DNAs within 200 bps flanking a transcription start site of a gene in the epigenetically edited chromosome in a cell are methylated as compared to the original state of the chromosome or the chromosome in a comparable cell not contacted with the epigenetic editor. In some embodiments, one single histone tail of histones bound to DNAs within 200 bps flanking a transcription start site of a gene in the epigenetically edited chromosome in a cell is methylated as compared to the original state of the chromosome or the chromosome in a comparable cell not contacted with the epigenetic editor. In some embodiments, one single histone octamer bound to DNAs within 200 bps flanking a transcription start site of a gene in the epigenetically edited chromosome in a cell is methylated as compared to the original state of the chromosome or the chromosome in a comparable cell not contacted with the epigenetic editor. In some embodiments, the histone is histone H3 and methylation is at Lysine 9, marking the target gene in the epigenetically edited chromosome for repressed expression. In some embodiments, the histone is histone H3 and methylation is at Lysine 4, marking the target gene in the epigenetically edited chromosome for increased expression.

[0239] In some embodiments, all histone tails of histones bound to DNA nucleotides within 200 bps flanking a transcription start site of a target gene in the epigenetically edited chromosome in a cell are demethylated as compared to the original state of the chromosome or the chromosome in a comparable cell not contacted with the epigenetic editor. In some embodiments, at least 1, 2, 3, 4, 5, 6, 7, 8, 9, 10, 11, 12, 13, 14, 15, 16, 17, 18, 19, 20 or more histone tails of histones bound to DNAs within 200 bps flanking a transcription start site of a gene in the epigenetically edited chromosome in a cell are demethylated as compared to the original state of the chromosome or the chromosome in a comparable cell not contacted with the epigenetic editor. In some embodiments, at least 5%, 6%, 7%, 8%, 9%, 10%, 15%, 20%, 25%, 30%, 35%, 40%, 45%, 50%, 55%, 60%, 65%, 70%, 75%, 80%, 85%, 90%, 95%, 96%, 97%, 98%, or 99% of histone tails of histones bound to DNAs within 200 bps flanking a transcription start site of a gene in the epigenetically edited chromosome in a cell are demethylated as compared to the original state of the chromosome or the chromosome in a comparable cell not contacted with the epigenetic editor. In some embodiments, one single histone tail of histones bound to DNAs within 200 bps flanking a transcription start site of a gene in the epigenetically edited chromosome in a cell is demethylated as compared to the original state of the chromosome or the chromosome in a comparable cell not contacted with the epigenetic editor. In some embodiments, one single histone octamer bound to DNAs within 200 bps flanking a transcription start site of a gene in the epigenetically edited chromosome in a cell is demethylated as compared to the original state of the chromosome or the chromosome in a comparable cell not contacted with the epigenetic editor. In some embodiments, the histone is histone H3 and methylation is at Lysine 9, marking the target gene in the epigenetically edited chromosome for repressed expression. In some embodiments, the histone is histone H3 and methylation is at Lysine 4, marking the target gene in the epigenetically edited chromosome for increased expression.

[0240] In some embodiments, all histone tails of histones bound to DNA nucleotides within 200 bps flanking a transcription start site of a target gene in the epigenetically edited chromosome in a cell are acetylated as compared to the original state of the chromosome or the chromosome in a comparable cell not contacted with the epigenetic editor. In some embodiments, at least 1, 2, 3, 4, 5, 6, 7, 8, 9, 10, 11, 12, 13, 14, 15, 16, 17, 18, 19, 20 or more histone tails of histones bound to DNAs within 200 bps flanking a transcription start site of a gene in the epigenetically edited chromosome in a cell are acetylated as compared to the original state of the chromosome or the chromosome in a comparable cell not contacted with the epigenetic editor. In some embodiments, at least 5%, 6%, 7%, 8%, 9%, 10%, 15%, 20%, 25%, 30%, 35%, 40%, 45%, 50%, 55%, 60%, 65%, 70%, 75%, 80%, 85%, 90%, 95%, 96%, 97%, 98%, or 99% of histone tails of histones bound to DNAs within 200 bps flanking a transcription start site of a gene in the epigenetically edited chromosome in a cell are acetylated as compared to the original state of the chromosome or the chromosome in a comparable cell not contacted with the epigenetic editor. In some embodiments, one single histone tail of histones bound to DNAs within 200 bps flanking a transcription start site of a gene in the epigenetically edited chromosome in a cell is acetylated as compared to the original state of the chromosome or the chromosome in a comparable cell not contacted with the epigenetic editor. In some embodiments, one single histone octamer bound to DNAs within 200 bps flanking a transcription start site of a gene in the epigenetically edited chromosome in a cell is acetylated as compared to the original state of the chromosome or the chromosome in a comparable cell not contacted with the epigenetic editor.

[0241] In some embodiments, all histone tails of histones bound to DNA nucleotides within 200 bps flanking a transcription start site of a target gene in the epigenetically edited chromosome in a cell are deacetylated as compared to the original state of the chromosome or the chromosome in a comparable cell not contacted with the epigenetic editor. In some embodiments, at least 1, 2, 3, 4, 5, 6, 7, 8, 9, 10, 11, 12, 13, 14, 15, 16, 17, 18, 19, 20 or more histone tails of histones bound to DNAs within 200 bps flanking a transcription start site of a gene in the epigenetically edited chromosome in a cell are deacetylated as compared to the original state of the chromosome or the chromosome in a comparable cell not contacted with the epigenetic editor. In some embodiments, at least 5%, 6%, 7%, 8%, 9%, 10%, 15%, 20%, 25%, 30%, 35%, 40%, 45%, 50%, 55%, 60%, 65%, 70%, 75%, 80%, 85%, 90%, 95%, 96%, 97%, 98%, or 99% of histone tails of histones bound to DNAs within 200 bps flanking a transcription start site of a gene in the epigenetically edited chromosome in a cell are deacetylated as compared to the original state of the chromosome or the chromosome in a comparable cell not contacted with the epigenetic editor. In some embodiments, one single histone tail of histones bound to DNAs within 200 bps flanking a transcription start site of a gene in the epigenetically edited chromosome in a cell is deacetylated as compared to the original state of the chromosome or the chromosome in a comparable cell not contacted with the epigenetic editor. In some embodiments, one single histone octamer bound to DNAs within 200 bps flanking a transcription start site of a gene in the epigenetically edited chromosome in a cell is deacetylated as compared to the original state of the chromosome or the chromosome in a comparable cell not contacted with the epigenetic editor.

[0242] In some embodiments, all CpG dinucleotides within 2000 bps flanking a promoter sequence of a gene in the epigenetically edited chromosome in a cell are methylated as compared to the original state of the gene or the gene in a comparable cell not contacted with the epigenetic editor. In some embodiments, at least 1, 2, 3, 4, 5, 6, 7, 8, 9, 10, 11, 12, 13, 14, 15, 16, 17, 18, 19, 20, 25, 30, 35, 40, 45, 50, 60, 70, 80, 90, 100, 150, 200, 250, 300, 350, 400, 450, 500, 550, 600, 650, 700 or more CpG dinucleotides within 2000 bps flanking a promoter sequence of a gene in the epigenetically edited chromosome in a cell are methylated as compared to the original state of the gene or the gene in a comparable cell not contacted with the epigenetic editor. In some embodiments, at least 5%, 6%, 7%, 8%, 9%, 10%, 15%, 20%, 25%, 30%, 35%, 40%, 45%, 50%, 55%, 60%, 65%, 70%, 75%, 80%, 85%, 90%, 95%, 96%, 97%, 98%, or 99% of CpG dinucleotides within 2000 bps flanking a promoter sequence of a gene in the epigenetically edited chromosome in a cell are methylated as compared to the original state of the gene or the gene in a comparable cell not contacted with the epigenetic editor. In some embodiments, one single CpG dinucleotide within 2000 bps flanking a promoter sequence of a gene in the epigenetically edited chromosome in a cell is methylated as compared to the original state of the gene or the gene in a comparable cell not contacted with the epigenetic editor.

[0243] In some embodiments, all CpG dinucleotides within 2000 bps flanking a promoter sequence of a gene in the epigenetically edited chromosome in a cell are demethylated as compared to the original state of the gene or the gene in a comparable cell not contacted with the epigenetic editor. In some embodiments, at least 1, 2, 3, 4, 5, 6, 7, 8, 9, 10, 11, 12, 13, 14, 15, 16, 17, 18, 19, 20, 25, 30, 35, 40, 45, 50, 60, 70, 80, 90, 100, 150, 200, 250, 300, 350, 400, 450, 500, 550, 600, 650, 700 or more CpG dinucleotides within 2000 bps flanking a promoter sequence of a gene in the epigenetically edited chromosome in a cell are demethylated as compared to the original state of the gene or the gene in a comparable cell not contacted with the epigenetic editor. In some embodiments, at least 5%, 6%, 7%, 8%, 9%, 10%, 15%, 20%, 25%, 30%, 35%, 40%, 45%, 50%, 55%, 60%, 65%, 70%, 75%, 80%, 85%, 90%, 95%, 96%, 97%, 98%, or 99% of CpG dinucleotides within 2000 bps flanking a promoter sequence of a gene in the epigenetically edited chromosome in a cell are demethylated as compared to the original state of the gene or the gene in a comparable cell not contacted with the epigenetic editor. In some embodiments, one single CpG dinucleotide within 2000 bps flanking a promoter sequence of a gene in the epigenetically edited chromosome in a cell is demethylated as compared to the original state of the gene or the gene in a comparable cell not contacted with the epigenetic editor.

[0244] In some embodiments, all histone tails of histones bound to DNA nucleotides within 2000 bps flanking a promoter sequence of a target gene in the epigenetically edited chromosome in a cell are methylated as compared to the original state of the chromosome or the chromosome in a comparable cell not contacted with the epigenetic editor. In some embodiments, at least 1, 2, 3, 4, 5, 6, 7, 8, 9, 10, 11, 12, 13, 14, 15, 16, 17, 18, 19, 20, 25, 30, 35, 40, 45, 50, 55, 60, 65, 70, 75, 80, 85, 90, 95, 100, 105, 110, 115, 120 or more histone tails of histones bound to DNAs within 2000 bps flanking a promoter sequence of a gene in the epigenetically edited chromosome in a cell are methylated as compared to the original state of the chromosome or the chromosome in a comparable cell not contacted with the epigenetic editor. In some embodiments, at least 5%, 6%, 7%, 8%, 9%, 10%, 15%, 20%, 25%, 30%, 35%, 40%, 45%, 50%, 55%, 60%, 65%, 70%, 75%, 80%, 85%, 90%, 95%, 96%, 97%, 98%, or 99% of histone tails of histones bound to DNAs within 2000 bps flanking a promoter sequence of a gene in the epigenetically edited chromosome in a cell are methylated as compared to the original state of the chromosome or the chromosome in a comparable cell not contacted with the epigenetic editor. In some embodiments, one single histone tail of histones bound to DNAs within 2000 bps flanking a promoter sequence of a gene in the epigenetically edited chromosome in a cell is methylated as compared to the original state of the chromosome or the chromosome in a comparable cell not contacted with the epigenetic editor. In some embodiments, one single histone octamer bound to DNAs within 2000 bps flanking a promoter sequence of a gene in the epigenetically edited chromosome in a cell is methylated as compared to the original state of the chromosome or the chromosome in a comparable cell not contacted with the epigenetic editor. In some embodiments, the histone is histone H3 and methylation is at Lysine 9, marking the target gene in the epigenetically edited chromosome for repressed expression. In some embodiments, the histone is histone H3 and methylation is at Lysine 4, marking the target gene in the epigenetically edited chromosome for increased expression.

[0245] In some embodiments, all histone tails of histones bound to DNA nucleotides within 2000 bps flanking a promoter sequence of a target gene in the epigenetically edited chromosome in a cell are demethylated as compared to the original state of the chromosome or the chromosome in a comparable cell not contacted with the epigenetic editor. In some embodiments, at least 1, 2, 3, 4, 5, 6, 7, 8, 9, 10, 11, 12, 13, 14, 15, 16, 17, 18, 19, 20, 25, 30, 35, 40, 45, 50, 55, 60, 65, 70, 75, 80, 85, 90, 95, 100, 105, 110, 115, 120 or more histone tails of histones bound to DNAs within 2000 bps flanking a promoter sequence of a gene in the epigenetically edited chromosome in a cell are demethylated as compared to the original state of the chromosome or the chromosome in a comparable cell not contacted with the epigenetic editor. In some embodiments, at least 5%, 6%, 7%, 8%, 9%, 10%, 15%, 20%, 25%, 30%, 35%, 40%, 45%, 50%, 55%, 60%, 65%, 70%, 75%, 80%, 85%, 90%, 95%, 96%, 97%, 98%, or 99% of histone tails of histones bound to DNAs within 2000 bps flanking a promoter sequence of a gene in the epigenetically edited chromosome in a cell are demethylated as compared to the original state of the chromosome or the chromosome in a comparable cell not contacted with the epigenetic editor. In some embodiments, one single histone tail of histones bound to DNAs within 2000 bps flanking a promoter sequence of a gene in the epigenetically edited chromosome in a cell is demethylated as compared to the original state of the chromosome or the chromosome in a comparable cell not contacted with the epigenetic editor. In some embodiments, one single histone octamer bound to DNAs within 2000 bps flanking a promoter sequence of a gene in the epigenetically edited chromosome in a cell is demethylated as compared to the original state of the chromosome or the chromosome in a comparable cell not contacted with the epigenetic editor. In some embodiments, the histone is histone H3 and methylation is at Lysine 9, marking the target gene in the epigenetically edited chromosome for repressed expression. In some embodiments, the histone is histone H3 and methylation is at Lysine 4, marking the target gene in the epigenetically edited chromosome for increased expression.

[0246] In some embodiments, all histone tails of histones bound to DNA nucleotides within 2000 bps flanking a promoter sequence of a target gene in the epigenetically edited chromosome in a cell are acetylated as compared to the original state of the chromosome or the chromosome in a comparable cell not contacted with the epigenetic editor. In some embodiments, at least 1, 2, 3, 4, 5, 6, 7, 8, 9, 10, 11, 12, 13, 14, 15, 16, 17, 18, 19, 20, 25, 30, 35, 40, 45, 50, 55, 60, 65, 70, 75, 80, 85, 90, 95, 100, 105, 110, 115, 120 or more histone tails of histones bound to DNAs within 2000 bps flanking a promoter sequence of a gene in the epigenetically edited chromosome in a cell are acetylated as compared to the original state of the chromosome or the chromosome in a comparable cell not contacted with the epigenetic editor. In some embodiments, at least 5%, 6%, 7%, 8%, 9%, 10%, 15%, 20%, 25%, 30%, 35%, 40%, 45%, 50%, 55%, 60%, 65%, 70%, 75%, 80%, 85%, 90%, 95%, 96%, 97%, 98%, or 99% of histone tails of histones bound to DNAs within 2000 bps flanking a promoter sequence of a gene in the epigenetically edited chromosome in a cell are acetylated as compared to the original state of the chromosome or the chromosome in a comparable cell not contacted with the epigenetic editor. In some embodiments, one single histone tail of histones bound to DNAs within 2000 bps flanking a promoter sequence of a gene in the epigenetically edited chromosome in a cell is acetylated as compared to the original state of the chromosome or the chromosome in a comparable cell not contacted with the epigenetic editor. In some embodiments, one single histone octamer bound to DNAs within 2000 bps flanking a promoter sequence of a gene in the epigenetically edited chromosome in a cell is acetylated as compared to the original state of the chromosome or the chromosome in a comparable cell not contacted with the epigenetic editor.

[0247] In some embodiments, all histone tails of histones bound to DNA nucleotides within 2000 bps flanking a promoter sequence of a target gene in the epigenetically edited chromosome in a cell are deacetylated as compared to the original state of the chromosome or the chromosome in a comparable cell not contacted with the epigenetic editor. In some embodiments, at least 1, 2, 3, 4, 5, 6, 7, 8, 9, 10, 11, 12, 13, 14, 15, 16, 17, 18, 19, 20, 25, 30, 35, 40, 45, 50, 55, 60, 65, 70, 75, 80, 85, 90, 95, 100, 105, 110, 115, 120 or more histone tails of histones bound to DNAs within 2000 bps flanking a promoter sequence of a gene in the epigenetically edited chromosome in a cell are deacetylated as compared to the original state of the chromosome or the chromosome in a comparable cell not contacted with the epigenetic editor. In some embodiments, at least 5%, 6%, 7%, 8%, 9%, 10%, 15%, 20%, 25%, 30%, 35%, 40%, 45%, 50%, 55%, 60%, 65%, 70%, 75%, 80%, 85%, 90%, 95%, 96%, 97%, 98%, or 99% of histone tails of histones bound to DNAs within 2000 bps flanking a promoter sequence of a gene in the epigenetically edited chromosome in a cell are deacetylated as compared to the original state of the chromosome or the chromosome in a comparable cell not contacted with the epigenetic editor. In some embodiments, one single histone tail of histones bound to DNAs within 2000 bps flanking a promoter sequence of a gene in the epigenetically edited chromosome in a cell is deacetylated as compared to the original state of the chromosome or the chromosome in a comparable cell not contacted with the epigenetic editor. In some embodiments, one single histone octamer bound to DNAs within 2000 bps flanking a promoter sequence of a gene in the epigenetically edited chromosome in a cell is deacetylated as compared to the original state of the chromosome or the chromosome in a comparable cell not contacted with the epigenetic editor.

[0248] In some embodiments, all CpG dinucleotides within 1500 bp flanking a promoter sequence of a gene in the epigenetically edited chromosome in a cell are methylated as compared to the original state of the gene or the gene in a comparable cell not contacted with the epigenetic editor. In some embodiments, at least 1, 2, 3, 4, 5, 6, 7, 8, 9, 10, 11, 12, 13, 14, 15, 16, 17, 18, 19, 20, 25, 30, 35, 40, 45, 50, 60, 70, 80, 90, 100, 150, 200, 250, 300, 350, 400, 450, 550, 500, 600, 650, 700 or more CpG dinucleotides within 1500 bps flanking a promoter sequence of a gene in the epigenetically edited chromosome in a cell are methylated as compared to the original state of the gene or the gene in a comparable cell not contacted with the epigenetic editor. In some embodiments, at least 5%, 6%, 7%, 8%, 9%, 10%, 15%, 20%, 25%, 30%, 35%, 40%, 45%, 50%, 55%, 60%, 65%, 70%, 75%, 80%, 85%, 90%, 95%, 96%, 97%, 98%, or 99% of CpG dinucleotides within 1500 bps flanking a promoter sequence of a gene in the epigenetically edited chromosome in a cell are methylated as compared to the original state of the gene or the gene in a comparable cell not contacted with the epigenetic editor. In some embodiments, one single CpG dinucleotide within 1500 bps flanking a promoter sequence of a gene in the epigenetically edited chromosome in a cell is methylated as compared to the original state of the gene or the gene in a comparable cell not contacted with the epigenetic editor.

[0249] In some embodiments, all CpG dinucleotides within 1500 bps flanking a promoter sequence of a gene in the epigenetically edited chromosome in a cell are demethylated as compared to the original state of the gene or the gene in a comparable cell not contacted with the epigenetic editor. In some embodiments, at least 1, 2, 3, 4, 5, 6, 7, 8, 9, 10, 11, 12, 13, 14, 15, 16, 17, 18, 19, 20, 25, 30, 35, 40, 45, 50, 60, 70, 80, 90, 100, 150, 200, 250, 300, 350, 400, 450, 500, 550, 600, 650, 700 or more CpG dinucleotides within 1500 bps flanking a promoter sequence of a gene in the epigenetically edited chromosome in a cell are demethylated as compared to the original state of the gene or the gene in a comparable cell not contacted with the epigenetic editor. In some embodiments, at least 5%, 6%, 7%, 8%, 9%, 10%, 15%, 20%, 25%, 30%, 35%, 40%, 45%, 50%, 55%, 60%, 65%, 70%, 75%, 80%, 85%, 90%, 95%, 96%, 97%, 98%, or 99% of CpG dinucleotides within 1500 bps flanking a promoter sequence of a gene in the epigenetically edited chromosome in a cell are demethylated as compared to the original state of the gene or the gene in a comparable cell not contacted with the epigenetic editor. In some embodiments, one single CpG dinucleotide within 1500 bps flanking a promoter sequence of a gene in the epigenetically edited chromosome in a cell is demethylated as compared to the original state of the gene or the gene in a comparable cell not contacted with the epigenetic editor.

[0250] In some embodiments, all histone tails of histones bound to DNA nucleotides within 1500 bps flanking a promoter sequence of a target gene in the epigenetically edited chromosome in a cell are methylated as compared to the original state of the chromosome or the chromosome in a comparable cell not contacted with the epigenetic editor. In some embodiments, at least 1, 2, 3, 4, 5, 6, 7, 8, 9, 10, 11, 12, 13, 14, 15, 16, 17, 18, 19, 20, 25, 30, 35, 40, 45, 50, 55, 60, 65, 70, 75, 80, 85, 90 or more histone tails of histones bound to DNAs within 1500 bps flanking a promoter sequence of a gene in the epigenetically edited chromosome in a cell are methylated as compared to the original state of the chromosome or the chromosome in a comparable cell not contacted with the epigenetic editor. In some embodiments, at least 5%, 6%, 7%, 8%, 9%, 10%, 15%, 20%, 25%, 30%, 35%, 40%, 45%, 50%, 55%, 60%, 65%, 70%, 75%, 80%, 85%, 90%, 95%, 96%, 97%, 98%, or 99% of histone tails of histones bound to DNAs within 1500 bps flanking a promoter sequence of a gene in the epigenetically edited chromosome in a cell are methylated as compared to the original state of the chromosome or the chromosome in a comparable cell not contacted with the epigenetic editor. In some embodiments, one single histone tail of histones bound to DNAs within 1500 bps flanking a promoter sequence of a gene in the epigenetically edited chromosome in a cell is methylated as compared to the original state of the chromosome or the chromosome in a comparable cell not contacted with the epigenetic editor. In some embodiments, one single histone octamer bound to DNAs within 1500 bps flanking a promoter sequence of a gene in the epigenetically edited chromosome in a cell is methylated as compared to the original state of the chromosome or the chromosome in a comparable cell not contacted with the epigenetic editor. In some embodiments, the histone is histone H3 and methylation is at Lysine 9, marking the target gene in the epigenetically edited chromosome for repressed expression. In some embodiments, the histone is histone H3 and methylation is at Lysine 4, marking the target gene in the epigenetically edited chromosome for increased expression.

[0251] In some embodiments, all histone tails of histones bound to DNA nucleotides within 1500 bps flanking a promoter sequence of a target gene in the epigenetically edited chromosome in a cell are demethylated as compared to the original state of the chromosome or the chromosome in a comparable cell not contacted with the epigenetic editor. In some embodiments, at least 1, 2, 3, 4, 5, 6, 7, 8, 9, 10, 11, 12, 13, 14, 15, 16, 17, 18, 19, 20, 25, 30, 35, 40, 45, 50, 55, 60, 65, 70, 75, 80, 85, 90 or more histone tails of histones bound to DNAs within 1500 bps flanking a promoter sequence of a gene in the epigenetically edited chromosome in a cell are demethylated as compared to the original state of the chromosome or the chromosome in a comparable cell not contacted with the epigenetic editor. In some embodiments, at least 5%, 6%, 7%, 8%, 9%, 10%, 15%, 20%, 25%, 30%, 35%, 40%, 45%, 50%, 55%, 60%, 65%, 70%, 75%, 80%, 85%, 90%, 95%, 96%, 97%, 98%, or 99% of histone tails of histones bound to DNAs within 1500 bps flanking a promoter sequence of a gene in the epigenetically edited chromosome in a cell are demethylated as compared to the original state of the chromosome or the chromosome in a comparable cell not contacted with the epigenetic editor. In some embodiments, one single histone tail of histones bound to DNAs within 1500 bps flanking a promoter sequence of a gene in the epigenetically edited chromosome in a cell is demethylated as compared to the original state of the chromosome or the chromosome in a comparable cell not contacted with the epigenetic editor. In some embodiments, one single histone octamer bound to DNAs within 1500 bps flanking a promoter sequence of a gene in the epigenetically edited chromosome in a cell is demethylated as compared to the original state of the chromosome or the chromosome in a comparable cell not contacted with the epigenetic editor. In some embodiments, the histone is histone H3 and methylation is at Lysine 9, marking the target gene in the epigenetically edited chromosome for repressed expression. In some embodiments, the histone is histone H3 and methylation is at Lysine 4, marking the target gene in the epigenetically edited chromosome for increased expression.

[0252] In some embodiments, all histone tails of histones bound to DNA nucleotides within 1500 bps flanking a promoter sequence of a target gene in the epigenetically edited chromosome in a cell are acetylated as compared to the original state of the chromosome or the chromosome in a comparable cell not contacted with the epigenetic editor. In some embodiments, at least 1, 2, 3, 4, 5, 6, 7, 8, 9, 10, 11, 12, 13, 14, 15, 16, 17, 18, 19, 20, 25, 30, 35, 40, 45, 50, 55, 60, 65, 70, 75, 80, 85, 90 or more histone tails of histones bound to DNAs within 1500 bps flanking a promoter sequence of a gene in the epigenetically edited chromosome in a cell are acetylated as compared to the original state of the chromosome or the chromosome in a comparable cell not contacted with the epigenetic editor. In some embodiments, at least 5%, 6%, 7%, 8%, 9%, 10%, 15%, 20%, 25%, 30%, 35%, 40%, 45%, 50%, 55%, 60%, 65%, 70%, 75%, 80%, 85%, 90%, 95%, 96%, 97%, 98%, or 99% of histone tails of histones bound to DNAs within 1500 bps flanking a promoter sequence of a gene in the epigenetically edited chromosome in a cell are acetylated as compared to the original state of the chromosome or the chromosome in a comparable cell not contacted with the epigenetic editor. In some embodiments, one single histone tail of histones bound to DNAs within 1500 bps flanking a promoter sequence of a gene in the epigenetically edited chromosome in a cell is acetylated as compared to the original state of the chromosome or the chromosome in a comparable cell not contacted with the epigenetic editor. In some embodiments, one single histone octamer bound to DNAs within 1500 bps flanking a promoter sequence of a gene in the epigenetically edited chromosome in a cell is acetylated as compared to the original state of the chromosome or the chromosome in a comparable cell not contacted with the epigenetic editor.

[0253] In some embodiments, all histone tails of histones bound to DNA nucleotides within 1500 bps flanking a promoter sequence of a target gene in the epigenetically edited chromosome in a cell are deacetylated as compared to the original state of the chromosome or the chromosome in a comparable cell not contacted with the epigenetic editor. In some embodiments, at least 1, 2, 3, 4, 5, 6, 7, 8, 9, 10, 11, 12, 13, 14, 15, 16, 17, 18, 19, 20, 25, 30, 35, 40, 45, 50, 55, 60, 65, 70, 75, 80, 85, 90 or more histone tails of histones bound to DNAs within 1500 bps flanking a promoter sequence of a gene in the epigenetically edited chromosome in a cell are deacetylated as compared to the original state of the chromosome or the chromosome in a comparable cell not contacted with the epigenetic editor. In some embodiments, at least 5%, 6%, 7%, 8%, 9%, 10%, 15%, 20%, 25%, 30%, 35%, 40%, 45%, 50%, 55%, 60%, 65%, 70%, 75%, 80%, 85%, 90%, 95%, 96%, 97%, 98%, or 99% of histone tails of histones bound to DNAs within 1500 bps flanking a promoter sequence of a gene in the epigenetically edited chromosome in a cell are deacetylated as compared to the original state of the chromosome or the chromosome in a comparable cell not contacted with the epigenetic editor. In some embodiments, one single histone tail of histones bound to DNAs within 1500 bps flanking a promoter sequence of a gene in the epigenetically edited chromosome in a cell is deacetylated as compared to the original state of the chromosome or the chromosome in a comparable cell not contacted with the epigenetic editor. In some embodiments, one single histone octamer bound to DNAs within 1500 bps flanking a promoter sequence of a gene in the epigenetically edited chromosome in a cell is deacetylated as compared to the original state of the chromosome or the chromosome in a comparable cell not contacted with the epigenetic editor.

[0254] In some embodiments, all CpG dinucleotides within 1000 bps flanking a promoter sequence of a gene in the epigenetically edited chromosome in a cell are methylated as compared to the original state of the gene or the gene in a comparable cell not contacted with the epigenetic editor. In some embodiments, at least 1, 2, 3, 4, 5, 6, 7, 8, 9, 10, 11, 12, 13, 14, 15, 16, 17, 18, 19, 20, 25, 30, 35, 40, 45, 50, 60, 70, 80, 90, 100, 150, 200, 250, 300, 350, 400, 450, 500 or more CpG dinucleotides within 1000 bps flanking a promoter sequence of a gene in the epigenetically edited chromosome in a cell are methylated as compared to the original state of the gene or the gene in a comparable cell not contacted with the epigenetic editor. In some embodiments, at least 5%, 6%, 7%, 8%, 9%, 10%, 15%, 20%, 25%, 30%, 35%, 40%, 45%, 50%, 55%, 60%, 65%, 70%, 75%, 80%, 85%, 90%, 95%, 96%, 97%, 98%, or 99% of CpG dinucleotides within 1000 bps flanking a promoter sequence of a gene in the epigenetically edited chromosome in a cell are methylated as compared to the original state of the gene or the gene in a comparable cell not contacted with the epigenetic editor. In some embodiments, one single CpG dinucleotide within 1000 bps flanking a promoter sequence of a gene in the epigenetically edited chromosome in a cell is methylated as compared to the original state of the gene or the gene in a comparable cell not contacted with the epigenetic editor.

[0255] In some embodiments, all CpG dinucleotides within 1000 bps flanking a promoter sequence of a gene in the epigenetically edited chromosome in a cell are demethylated as compared to the original state of the gene or the gene in a comparable cell not contacted with the epigenetic editor. In some embodiments, at least 1, 2, 3, 4, 5, 6, 7, 8, 9, 10, 11, 12, 13, 14, 15, 16, 17, 18, 19, 20, 25, 30, 35, 40, 45, 50, 60, 70, 80, 90, 100, 150, 200, 250, 300, 350, 400, 450, 500 or more CpG dinucleotides within 1000 bps flanking a promoter sequence of a gene in the epigenetically edited chromosome in a cell are demethylated as compared to the original state of the gene or the gene in a comparable cell not contacted with the epigenetic editor. In some embodiments, at least 5%, 6%, 7%, 8%, 9%, 10%, 15%, 20%, 25%, 30%, 35%, 40%, 45%, 50%, 55%, 60%, 65%, 70%, 75%, 80%, 85%, 90%, 95%, 96%, 97%, 98%, or 99% of CpG dinucleotides within 1000 bps flanking a promoter sequence of a gene in the epigenetically edited chromosome in a cell are demethylated as compared to the original state of the gene or the gene in a comparable cell not contacted with the epigenetic editor. In some embodiments, one single CpG dinucleotide within 1000 bps flanking a promoter sequence of a gene in the epigenetically edited chromosome in a cell is demethylated as compared to the original state of the gene or the gene in a comparable cell not contacted with the epigenetic editor.

[0256] In some embodiments, all histone tails of histones bound to DNA nucleotides within 1000 bps flanking a promoter sequence of a target gene in the epigenetically edited chromosome in a cell are methylated as compared to the original state of the chromosome or the chromosome in a comparable cell not contacted with the epigenetic editor. In some embodiments, at least 1, 2, 3, 4, 5, 6, 7, 8, 9, 10, 11, 12, 13, 14, 15, 16, 17, 18, 19, 20, 25, 30, 35, 40, 45, 50, 55, 60 or more histone tails of histones bound to DNAs within 1000 bps flanking a promoter sequence of a gene in the epigenetically edited chromosome in a cell are methylated as compared to the original state of the chromosome or the chromosome in a comparable cell not contacted with the epigenetic editor. In some embodiments, at least 5%, 6%, 7%, 8%, 9%, 10%, 15%, 20%, 25%, 30%, 35%, 40%, 45%, 50%, 55%, 60%, 65%, 70%, 75%, 80%, 85%, 90%, 95%, 96%, 97%, 98%, or 99% of histone tails of histones bound to DNAs within 1000 bps flanking a promoter sequence of a gene in the epigenetically edited chromosome in a cell are methylated as compared to the original state of the chromosome or the chromosome in a comparable cell not contacted with the epigenetic editor. In some embodiments, one single histone tail of histones bound to DNAs within 1000 bps flanking a promoter sequence of a gene in the epigenetically edited chromosome in a cell is methylated as compared to the original state of the chromosome or the chromosome in a comparable cell not contacted with the epigenetic editor. In some embodiments, one single histone octamer bound to DNAs within 1000 bps flanking a promoter sequence of a gene in the epigenetically edited chromosome in a cell is methylated as compared to the original state of the chromosome or the chromosome in a comparable cell not contacted with the epigenetic editor. In some embodiments, the histone is histone H3 and methylation is at Lysine 9, marking the target gene in the epigenetically edited chromosome for repressed expression. In some embodiments, the histone is histone H3 and methylation is at Lysine 4, marking the target gene in the epigenetically edited chromosome for increased expression.

[0257] In some embodiments, all histone tails of histones bound to DNA nucleotides within 1000 bps flanking a promoter sequence of a target gene in the epigenetically edited chromosome in a cell are demethylated as compared to the original state of the chromosome or the chromosome in a comparable cell not contacted with the epigenetic editor. In some embodiments, at least 1, 2, 3, 4, 5, 6, 7, 8, 9, 10, 11, 12, 13, 14, 15, 16, 17, 18, 19, 20, 25, 30, 35, 40, 45, 50, 55, 60 or more histone tails of histones bound to DNAs within 1000 bps flanking a promoter sequence of a gene in the epigenetically edited chromosome in a cell are demethylated as compared to the original state of the chromosome or the chromosome in a comparable cell not contacted with the epigenetic editor. In some embodiments, at least 5%, 6%, 7%, 8%, 9%, 10%, 15%, 20%, 25%, 30%, 35%, 40%, 45%, 50%, 55% 60%, 65%, 70%, 75%, 80%, 85%, 90%, 95%, 96%, 97%, 98%, or 99% of histone tails of histones bound to DNAs within 1000 bps flanking a promoter sequence of a gene in the epigenetically edited chromosome in a cell are demethylated as compared to the original state of the chromosome or the chromosome in a comparable cell not contacted with the epigenetic editor. In some embodiments, one single histone tail of histones bound to DNAs within 1000 bps flanking a promoter sequence of a gene in the epigenetically edited chromosome in a cell is demethylated as compared to the original state of the chromosome or the chromosome in a comparable cell not contacted with the epigenetic editor. In some embodiments, one single histone octamer bound to DNAs within 1000 bps flanking a promoter sequence of a gene in the epigenetically edited chromosome in a cell is demethylated as compared to the original state of the chromosome or the chromosome in a comparable cell not contacted with the epigenetic editor. In some embodiments, the histone is histone H3 and methylation is at Lysine 9, marking the target gene in the epigenetically edited chromosome for repressed expression. In some embodiments, the histone is histone H3 and methylation is at Lysine 4, marking the target gene in the epigenetically edited chromosome for increased expression.

[0258] In some embodiments, all histone tails of histones bound to DNA nucleotides within 1000 bps flanking a promoter sequence of a target gene in the epigenetically edited chromosome in a cell are acetylated as compared to the original state of the chromosome or the chromosome in a comparable cell not contacted with the epigenetic editor. In some embodiments, at least 1, 2, 3, 4, 5, 6, 7, 8, 9, 10, 11, 12, 13, 14, 15, 16, 17, 18, 19, 20, 25, 30, 35, 40, 45, 50, 55, 60 or more histone tails of histones bound to DNAs within 1000 bps flanking a promoter sequence of a gene in the epigenetically edited chromosome in a cell are acetylated as compared to the original state of the chromosome or the chromosome in a comparable cell not contacted with the epigenetic editor. In some embodiments, at least 5%, 6%, 7%, 8%, 9%, 10%, 15%, 20%, 25%, 30%, 35%, 40%, 45%, 50%, 55%, 60%, 65%, 70%, 75%, 80%, 85%, 90%, 95%, 96%, 97%, 98%, or 99% of histone tails of histones bound to DNAs within 1000 bps flanking a promoter sequence of a gene in the epigenetically edited chromosome in a cell are acetylated as compared to the original state of the chromosome or the chromosome in a comparable cell not contacted with the epigenetic editor. In some embodiments, one single histone tail of histones bound to DNAs within 1000 bps flanking a promoter sequence of a gene in the epigenetically edited chromosome in a cell is acetylated as compared to the original state of the chromosome or the chromosome in a comparable cell not contacted with the epigenetic editor. In some embodiments, one single histone octamer bound to DNAs within 1000 bps flanking a promoter sequence of a gene in the epigenetically edited chromosome in a cell is acetylated as compared to the original state of the chromosome or the chromosome in a comparable cell not contacted with the epigenetic editor.

[0259] In some embodiments, all histone tails of histones bound to DNA nucleotides within 1000 bps flanking a promoter sequence of a target gene in the epigenetically edited chromosome in a cell are deacetylated as compared to the original state of the chromosome or the chromosome in a comparable cell not contacted with the epigenetic editor. In some embodiments, at least 1, 2, 3, 4, 5, 6, 7, 8, 9, 10, 11, 12, 13, 14, 15, 16, 17, 18, 19, 20, 25, 30, 35, 40, 45, 50, 55, 60 or more histone tails of histones bound to DNAs within 1000 bps flanking a promoter sequence of a gene in the epigenetically edited chromosome in a cell are deacetylated as compared to the original state of the chromosome or the chromosome in a comparable cell not contacted with the epigenetic editor. In some embodiments, at least 5%, 6%, 7%, 8%, 9%, 10%, 15%, 20%, 25%, 30%, 35%, 40%, 45%, 50%, 55% 60%, 65%, 70%, 75%, 80%, 85%, 90%, 95%, 96%, 97%, 98%, or 99% of histone tails of histones bound to DNAs within 1000 bps flanking a promoter sequence of a gene in the epigenetically edited chromosome in a cell are deacetylated as compared to the original state of the chromosome or the chromosome in a comparable cell not contacted with the epigenetic editor. In some embodiments, one single histone tail of histones bound to DNAs within 1000 bps flanking a promoter sequence of a gene in the epigenetically edited chromosome in a cell is deacetylated as compared to the original state of the chromosome or the chromosome in a comparable cell not contacted with the epigenetic editor. In some embodiments, one single histone octamer bound to DNAs within 1000 bps flanking a promoter sequence of a gene in the epigenetically edited chromosome in a cell is deacetylated as compared to the original state of the chromosome or the chromosome in a comparable cell not contacted with the epigenetic editor.

[0260] In some embodiments, all CpG dinucleotides within 500 bps flanking a promoter sequence of a gene in the epigenetically edited chromosome in a cell are methylated as compared to the original state of the gene or the gene in a comparable cell not contacted with the epigenetic editor. In some embodiments, at least 1, 2, 3, 4, 5, 6, 7, 8, 9, 10, 11, 12, 13, 14, 15, 16, 17, 18, 19, 20, 25, 30, 35, 40, 45, 50, 60, 70, 80, 90, 100, 150, 200 or more CpG dinucleotides within 500 bps flanking a promoter sequence of a gene in the epigenetically edited chromosome in a cell are methylated as compared to the original state of the gene or the gene in a comparable cell not contacted with the epigenetic editor. In some embodiments, at least 5%, 6%, 7%, 8%, 9%, 10%, 15%, 20%, 25%, 30%, 35%, 40%, 45%, 50%, 55%, 60%, 65%, 70%, 75%, 80%, 85%, 90%, 95%, 96%, 97%, 98%, or 99% of CpG dinucleotides within 500 bps flanking a promoter sequence of a gene in the epigenetically edited chromosome in a cell are methylated as compared to the original state of the gene or the gene in a comparable cell not contacted with the epigenetic editor. In some embodiments, one single CpG dinucleotide within 500 bps flanking a promoter sequence of a gene in the epigenetically edited chromosome in a cell is methylated as compared to the original state of the gene or the gene in a comparable cell not contacted with the epigenetic editor.

[0261] In some embodiments, all CpG dinucleotides within 500 bps flanking a promoter sequence of a gene in the epigenetically edited chromosome in a cell are demethylated as compared to the original state of the gene or the gene in a comparable cell not contacted with the epigenetic editor. In some embodiments, at least 1, 2, 3, 4, 5, 6, 7, 8, 9, 10, 11, 12, 13, 14, 15, 16, 17, 18, 19, 20, 25, 30, 35, 40, 45, 50, 60, 70, 80, 90, 100, 150, 200 or more CpG dinucleotides within 500 bps flanking a promoter sequence of a gene in the epigenetically edited chromosome in a cell are demethylated as compared to the original state of the gene or the gene in a comparable cell not contacted with the epigenetic editor. In some embodiments, at least 5%, 6%, 7%, 8%, 9%, 10%, 15%, 20%, 25%, 30%, 35%, 40%, 45%, 50%, 55%, 60%, 65%, 70%, 75%, 80%, 85%, 90%, 95%, 96%, 97%, 98%, or 99% of CpG dinucleotides within 500 bps flanking a promoter sequence of a gene in the epigenetically edited chromosome in a cell are demethylated as compared to the original state of the gene or the gene in a comparable cell not contacted with the epigenetic editor. In some embodiments, one single CpG dinucleotide within 500 bps flanking a promoter sequence of a gene in the epigenetically edited chromosome in a cell is demethylated as compared to the original state of the gene or the gene in a comparable cell not contacted with the epigenetic editor.

[0262] In some embodiments, all histone tails of histones bound to DNA nucleotides within 500 bps flanking a promoter sequence of a target gene in the epigenetically edited chromosome in a cell are methylated as compared to the original state of the chromosome or the chromosome in a comparable cell not contacted with the epigenetic editor. In some embodiments, at least 1, 2, 3, 4, 5, 6, 7, 8, 9, 10, 11, 12, 13, 14, 15, 16, 17, 18, 19, 20, 25, 30 or more histone tails of histones bound to DNAs within 500 bps flanking a promoter sequence of a gene in the epigenetically edited chromosome in a cell are methylated as compared to the original state of the chromosome or the chromosome in a comparable cell not contacted with the epigenetic editor. In some embodiments, at least 5%, 6%, 7%, 8%, 9%, 10%, 15%, 20%, 25%, 30%, 35%, 40%, 45%, 50%, 55%, 60%, 65%, 70%, 75%, 80%, 85%, 90%, 95%, 96%, 97%, 98%, or 99% of histone tails of histones bound to DNAs within 500 bps flanking a promoter sequence of a gene in the epigenetically edited chromosome in a cell are methylated as compared to the original state of the chromosome or the chromosome in a comparable cell not contacted with the epigenetic editor. In some embodiments, one single histone tail of histones bound to DNAs within 500 bps flanking a promoter sequence of a gene in the epigenetically edited chromosome in a cell is methylated as compared to the original state of the chromosome or the chromosome in a comparable cell not contacted with the epigenetic editor. In some embodiments, one single histone octamer bound to DNAs within 500 bps flanking a promoter sequence of a gene in the epigenetically edited chromosome in a cell is methylated as compared to the original state of the chromosome or the chromosome in a comparable cell not contacted with the epigenetic editor. In some embodiments, the histone is histone H3 and methylation is at Lysine 9, marking the target gene in the epigenetically edited chromosome for repressed expression. In some embodiments, the histone is histone H3 and methylation is at Lysine 4, marking the target gene in the epigenetically edited chromosome for increased expression.

[0263] In some embodiments, all histone tails of histones bound to DNA nucleotides within 500 bps flanking a promoter sequence of a target gene in the epigenetically edited chromosome in a cell are demethylated as compared to the original state of the chromosome or the chromosome in a comparable cell not contacted with the epigenetic editor. In some embodiments, at least 1, 2, 3, 4, 5, 6, 7, 8, 9, 10, 11, 12, 13, 14, 15, 16, 17, 18, 19, 20, 25, 30 or more histone tails of histones bound to DNAs within 500 bps flanking a promoter sequence of a gene in the epigenetically edited chromosome in a cell are demethylated as compared to the original state of the chromosome or the chromosome in a comparable cell not contacted with the epigenetic editor. In some embodiments, at least 5%, 6%, 7%, 8%, 9%, 10%, 15%, 20%, 25%, 30%, 35%, 40%, 45%, 50%, 55%, 60%, 65%, 70%, 75%, 80%, 85%, 90%, 95%, 96%, 97%, 98%, or 99% of histone tails of histones bound to DNAs within 500 bps flanking a promoter sequence of a gene in the epigenetically edited chromosome in a cell are demethylated as compared to the original state of the chromosome or the chromosome in a comparable cell not contacted with the epigenetic editor. In some embodiments, one single histone tail of histones bound to DNAs within 500 bps flanking a promoter sequence of a gene in the epigenetically edited chromosome in a cell is demethylated as compared to the original state of the chromosome or the chromosome in a comparable cell not contacted with the epigenetic editor. In some embodiments, one single histone octamer bound to DNAs within 500 bps flanking a promoter sequence of a gene in the epigenetically edited chromosome in a cell is demethylated as compared to the original state of the chromosome or the chromosome in a comparable cell not contacted with the epigenetic editor. In some embodiments, the histone is histone H3 and methylation is at Lysine 9, marking the target gene in the epigenetically edited chromosome for repressed expression. In some embodiments, the histone is histone H3 and methylation is at Lysine 4, marking the target gene in the epigenetically edited chromosome for increased expression.

[0264] In some embodiments, all histone tails of histones bound to DNA nucleotides within 500 bps flanking a promoter sequence of a target gene in the epigenetically edited chromosome in a cell are acetylated as compared to the original state of the chromosome or the chromosome in a comparable cell not contacted with the epigenetic editor. In some embodiments, at least 1, 2, 3, 4, 5, 6, 7, 8, 9, 10, 11, 12, 13, 14, 15, 16, 17, 18, 19, 20, 25, 30 or more histone tails of histones bound to DNAs within 500 bps flanking a promoter sequence of a gene in the epigenetically edited chromosome in a cell are acetylated as compared to the original state of the chromosome or the chromosome in a comparable cell not contacted with the epigenetic editor. In some embodiments, at least 5%, 6%, 7%, 8%, 9%, 10%, 15%, 20%, 25%, 30%, 35%, 40%, 45%, 50%, 55%, 60%, 65%, 70%, 75%, 80%, 85%, 90%, 95%, 96%, 97%, 98%, or 99% of histone tails of histones bound to DNAs within 500 bps flanking a promoter sequence of a gene in the epigenetically edited chromosome in a cell are acetylated as compared to the original state of the chromosome or the chromosome in a comparable cell not contacted with the epigenetic editor. In some embodiments, one single histone tail of histones bound to DNAs within 500 bps flanking a promoter sequence of a gene in the epigenetically edited chromosome in a cell is acetylated as compared to the original state of the chromosome or the chromosome in a comparable cell not contacted with the epigenetic editor. In some embodiments, one single histone octamer bound to DNAs within 500 bps flanking a promoter sequence of a gene in the epigenetically edited chromosome in a cell is acetylated as compared to the original state of the chromosome or the chromosome in a comparable cell not contacted with the epigenetic editor.

[0265] In some embodiments, all histone tails of histones bound to DNA nucleotides within 500 bps flanking a promoter sequence of a target gene in the epigenetically edited chromosome in a cell are deacetylated as compared to the original state of the chromosome or the chromosome in a comparable cell not contacted with the epigenetic editor. In some embodiments, at least 1, 2, 3, 4, 5, 6, 7, 8, 9, 10, 11, 12, 13, 14, 15, 16, 17, 18, 19, 20, 25, 30 or more histone tails of histones bound to DNAs within 500 bps flanking a promoter sequence of a gene in the epigenetically edited chromosome in a cell are deacetylated as compared to the original state of the chromosome or the chromosome in a comparable cell not contacted with the epigenetic editor. In some embodiments, at least 5%, 6%, 7%, 8%, 9%, 10%, 15%, 20%, 25%, 30%, 35%, 40%, 45%, 50%, 55%, 60%, 65%, 70%, 75%, 80%, 85%, 90%, 95%, 96%, 97%, 98%, or 99% of histone tails of histones bound to DNAs within 500 bps flanking a promoter sequence of a gene in the epigenetically edited chromosome in a cell are deacetylated as compared to the original state of the chromosome or the chromosome in a comparable cell not contacted with the epigenetic editor. In some embodiments, one single histone tail of histones bound to DNAs within 500 bps flanking a promoter sequence of a gene in the epigenetically edited chromosome in a cell is deacetylated as compared to the original state of the chromosome or the chromosome in a comparable cell not contacted with the epigenetic editor. In some embodiments, one single histone octamer bound to DNAs within 500 bps flanking a promoter sequence of a gene in the epigenetically edited chromosome in a cell is deacetylated as compared to the original state of the chromosome or the chromosome in a comparable cell not contacted with the epigenetic editor.

[0266] In some embodiments, all CpG dinucleotides within 200 bps flanking a promoter sequence of a gene in the epigenetically edited chromosome in a cell are demethylated as compared to the original state of the gene or the gene in a comparable cell not contacted with the epigenetic editor. In some embodiments, at least 1, 2, 3, 4, 5, 6, 7, 8, 9, 10, 11, 12, 13, 14, 15, 16, 17, 18, 19, 20, 25, 30, 35, 40, 45, 50, 60, 70, 80, 90 or more CpG dinucleotides within 200 bps flanking a promoter sequence of a gene in the epigenetically edited chromosome in a cell are demethylated as compared to the original state of the gene or the gene in a comparable cell not contacted with the epigenetic editor. In some embodiments, at least 5%, 6%, 7%, 8%, 9%, 10%, 15%, 20%, 25%, 30%, 35%, 40%, 45%, 50%, 55%, 60%, 65%, 70%, 75%, 80%, 85%, 90%, 95%, 96%, 97%, 98%, or 99% of CpG dinucleotides within 200 bps flanking a promoter sequence of a gene in the epigenetically edited chromosome in a cell are demethylated as compared to the original state of the gene or the gene in a comparable cell not contacted with the epigenetic editor. In some embodiments, one single CpG dinucleotide within 200 bps flanking a promoter sequence of a gene in the epigenetically edited chromosome in a cell is demethylated as compared to the original state of the gene or the gene in a comparable cell not contacted with the epigenetic editor.

[0267] In some embodiments, all histone tails of histones bound to DNA nucleotides within 200 bps flanking a promoter sequence of a target gene in the epigenetically edited chromosome in a cell are methylated as compared to the original state of the chromosome or the chromosome in a comparable cell not contacted with the epigenetic editor. In some embodiments, at least 1, 2, 3, 4, 5, 6, 7, 8, 9, 10, 11, 12, 13, 14, 15, 16, 17, 18, 19, 20 or more histone tails of histones bound to DNAs within 200 bps flanking a promoter sequence of a gene in the epigenetically edited chromosome in a cell are methylated as compared to the original state of the chromosome or the chromosome in a comparable cell not contacted with the epigenetic editor. In some embodiments, at least 5%, 6%, 7%, 8%, 9%, 10%, 15%, 20%, 25%, 30%, 35%, 40%, 45%, 50%, 55%, 60%, 65%, 70%, 75%, 80%, 85%, 90%, 95%, 96%, 97%, 98%, or 99% of histone tails of histones bound to DNAs within 200 bps flanking a promoter sequence of a gene in the epigenetically edited chromosome in a cell are methylated as compared to the original state of the chromosome or the chromosome in a comparable cell not contacted with the epigenetic editor. In some embodiments, one single histone tail of histones bound to DNAs within 200 bps flanking a promoter sequence of a gene in the epigenetically edited chromosome in a cell is methylated as compared to the original state of the chromosome or the chromosome in a comparable cell not contacted with the epigenetic editor. In some embodiments, one single histone octamer bound to DNAs within 200 bps flanking a promoter sequence of a gene in the epigenetically edited chromosome in a cell is methylated as compared to the original state of the chromosome or the chromosome in a comparable cell not contacted with the epigenetic editor. In some embodiments, the histone is histone H3 and methylation is at Lysine 9, marking the target gene in the epigenetically edited chromosome for repressed expression. In some embodiments, the histone is histone H3 and methylation is at Lysine 4, marking the target gene in the epigenetically edited chromosome for increased expression.

[0268] In some embodiments, all histone tails of histones bound to DNA nucleotides within 200 bps flanking a promoter sequence of a target gene in the epigenetically edited chromosome in a cell are demethylated as compared to the original state of the chromosome or the chromosome in a comparable cell not contacted with the epigenetic editor. In some embodiments, at least 1, 2, 3, 4, 5, 6, 7, 8, 9, 10, 11, 12, 13, 14, 15, 16, 17, 18, 19, 20 or more histone tails of histones bound to DNAs within 200 bps flanking a promoter sequence of a gene in the epigenetically edited chromosome in a cell are demethylated as compared to the original state of the chromosome or the chromosome in a comparable cell not contacted with the epigenetic editor. In some embodiments, at least 5%, 6%, 7%, 8%, 9%, 10%, 15%, 20%, 25%, 30%, 35%, 40%, 45%, 50%, 55%, 60%, 65%, 70%, 75%, 80%, 85%, 90%, 95%, 96%, 97%, 98%, or 99% of histone tails of histones bound to DNAs within 200 bps flanking a promoter sequence of a gene in the epigenetically edited chromosome in a cell are demethylated as compared to the original state of the chromosome or the chromosome in a comparable cell not contacted with the epigenetic editor. In some embodiments, one single histone tail of histones bound to DNAs within 200 bps flanking a promoter sequence of a gene in the epigenetically edited chromosome in a cell is demethylated as compared to the original state of the chromosome or the chromosome in a comparable cell not contacted with the epigenetic editor. In some embodiments, one single histone octamer bound to DNAs within 200 bps flanking a promoter sequence of a gene in the epigenetically edited chromosome in a cell is demethylated as compared to the original state of the chromosome or the chromosome in a comparable cell not contacted with the epigenetic editor. In some embodiments, the histone is histone H3 and methylation is at Lysine 9, marking the target gene in the epigenetically edited chromosome for repressed expression. In some embodiments, the histone is histone H3 and methylation is at Lysine 4, marking the target gene in the epigenetically edited chromosome for increased expression.

[0269] In some embodiments, all histone tails of histones bound to DNA nucleotides within 200 bps flanking a promoter sequence of a target gene in the epigenetically edited chromosome in a cell are acetylated as compared to the original state of the chromosome or the chromosome in a comparable cell not contacted with the epigenetic editor. In some embodiments, at least 1, 2, 3, 4, 5, 6, 7, 8, 9, 10, 11, 12, 13, 14, 15, 16, 17, 18, 19, 20 or more histone tails of histones bound to DNAs within 200 bps flanking a promoter sequence of a gene in the epigenetically edited chromosome in a cell are acetylated as compared to the original state of the chromosome or the chromosome in a comparable cell not contacted with the epigenetic editor. In some embodiments, at least 5%, 6%, 7%, 8%, 9%, 10%, 15%, 20%, 25%, 30%, 35%, 40%, 45%, 50%, 55%, 60%, 65%, 70%, 75%, 80%, 85%, 90%, 95%, 96%, 97%, 98%, or 99% of histone tails of histones bound to DNAs within 200 bps flanking a promoter sequence of a gene in the epigenetically edited chromosome in a cell are acetylated as compared to the original state of the chromosome or the chromosome in a comparable cell not contacted with the epigenetic editor. In some embodiments, one single histone tail of histones bound to DNAs within 200 bps flanking a promoter sequence of a gene in the epigenetically edited chromosome in a cell is acetylated as compared to the original state of the chromosome or the chromosome in a comparable cell not contacted with the epigenetic editor. In some embodiments, one single histone octamer bound to DNAs within 200 bps flanking a promoter sequence of a gene in the epigenetically edited chromosome in a cell is acetylated as compared to the original state of the chromosome or the chromosome in a comparable cell not contacted with the epigenetic editor.

[0270] In some embodiments, all histone tails of histones bound to DNA nucleotides within 200 bps flanking a promoter sequence of a target gene in the epigenetically edited chromosome in a cell are deacetylated as compared to the original state of the chromosome or the chromosome in a comparable cell not contacted with the epigenetic editor. In some embodiments, at least 1, 2, 3, 4, 5, 6, 7, 8, 9, 10, 11, 12, 13, 14, 15, 16, 17, 18, 19, 20 or more histone tails of histones bound to DNAs within 200 bps flanking a promoter sequence of a gene in the epigenetically edited chromosome in a cell are deacetylated as compared to the original state of the chromosome or the chromosome in a comparable cell not contacted with the epigenetic editor. In some embodiments, at least 5%, 6%, 7%, 8%, 9%, 10%, 15%, 20%, 25%, 30%, 35%, 40%, 45%, 50%, 55%, 60%, 65%, 70%, 75%, 80%, 85%, 90%, 95%, 96%, 97%, 98%, or 99% of histone tails of histones bound to DNAs within 200 bps flanking a promoter sequence of a gene in the epigenetically edited chromosome in a cell are deacetylated as compared to the original state of the chromosome or the chromosome in a comparable cell not contacted with the epigenetic editor. In some embodiments, one single histone tail of histones bound to DNAs within 200 bps flanking a promoter sequence of a gene in the epigenetically edited chromosome in a cell is deacetylated as compared to the original state of the chromosome or the chromosome in a comparable cell not contacted with the epigenetic editor. In some embodiments, one single histone octamer bound to DNAs within 200 bps flanking a promoter sequence of a gene in the epigenetically edited chromosome in a cell is deacetylated as compared to the original state of the chromosome or the chromosome in a comparable cell not contacted with the epigenetic editor.

[0271] In some embodiments, all CpG dinucleotides within 2000 bps flanking a enhancer sequence, an isolator sequence, or a CTCF binding sequence of a gene in the epigenetically edited chromosome in a cell are methylated as compared to the original state of the gene or the gene in a comparable cell not contacted with the epigenetic editor. In some embodiments, at least 1, 2, 3, 4, 5, 6, 7, 8, 9, 10, 11, 12, 13, 14, 15, 16, 17, 18, 19, 20, 25, 30, 35, 40, 45, 50, 60, 70, 80, 90, 100, 150, 200, 250, 300, 350, 400, 450, 500, 550, 600, 650, 700 or more CpG dinucleotides within 2000 bps flanking a enhancer sequence, an isolator sequence, or a CTCF binding sequence of a gene in the epigenetically edited chromosome in a cell are methylated as compared to the original state of the gene or the gene in a comparable cell not contacted with the epigenetic editor. In some embodiments, at least 5%, 6%, 7%, 8%, 9%, 10%, 15%, 20%, 25%, 30%, 35%, 40%, 45%, 50%, 55%, 60%, 65%, 70%, 75%, 80%, 85%, 90%, 95%, 96%, 97%, 98%, or 99% of CpG dinucleotides within 2000 bps flanking a enhancer sequence, an isolator sequence, or a CTCF binding sequence of a gene in the epigenetically edited chromosome in a cell are methylated as compared to the original state of the gene or the gene in a comparable cell not contacted with the epigenetic editor. In some embodiments, one single CpG dinucleotide within 2000 bps flanking a enhancer sequence, an isolator sequence, or a CTCF binding sequence of a gene in the epigenetically edited chromosome in a cell is methylated as compared to the original state of the gene or the gene in a comparable cell not contacted with the epigenetic editor.

[0272] In some embodiments, all CpG dinucleotides within 2000 bps flanking a enhancer sequence, isolator sequence, or CTCF binding sequence of a gene in the epigenetically edited chromosome in a cell are demethylated as compared to the original state of the gene or the gene in a comparable cell not contacted with the epigenetic editor. In some embodiments, at least 1, 2, 3, 4, 5, 6, 7, 8, 9, 10, 11, 12, 13, 14, 15, 16, 17, 18, 19, 20, 25, 30, 35, 40, 45, 50, 60, 70, 80, 90, 100, 150, 200, 250, 300, 350, 400, 450, 500, 550, 600, 650, 700 or more CpG dinucleotides within 2000 bps flanking a enhancer sequence, isolator sequence, or CTCF binding sequence of a gene in the epigenetically edited chromosome in a cell are demethylated as compared to the original state of the gene or the gene in a comparable cell not contacted with the epigenetic editor. In some embodiments, at least 5%, 6%, 7%, 8%, 9%, 10%, 15%, 20%, 25%, 30%, 35%, 40%, 45%, 50%, 55%, 60%, 65%, 70%, 75%, 80%, 85%, 90%, 95%, 96%, 97%, 98%, or 99% of CpG dinucleotides within 2000 bps flanking a enhancer sequence, isolator sequence, or CTCF binding sequence of a gene in the epigenetically edited chromosome in a cell are demethylated as compared to the original state of the gene or the gene in a comparable cell not contacted with the epigenetic editor. In some embodiments, one single CpG dinucleotide within 2000 bps flanking a enhancer sequence, isolator sequence, or CTCF binding sequence of a gene in the epigenetically edited chromosome in a cell is demethylated as compared to the original state of the gene or the gene in a comparable cell not contacted with the epigenetic editor.

[0273] In some embodiments, all histone tails of histones bound to DNA nucleotides within 2000 bps flanking a enhancer sequence, isolator sequence, or CTCF binding sequence of a target gene in the epigenetically edited chromosome in a cell are methylated as compared to the original state of the chromosome or the chromosome in a comparable cell not contacted with the epigenetic editor. In some embodiments, at least 1, 2, 3, 4, 5, 6, 7, 8, 9, 10, 11, 12, 13, 14, 15, 16, 17, 18, 19, 20, 25, 30, 35, 40, 45, 50, 55, 60, 65, 70, 75, 80, 85, 90, 95, 100, 105, 110, 115, 120 or more histone tails of histones bound to DNAs within 2000 bps flanking a enhancer sequence, isolator sequence, or CTCF binding sequence of a gene in the epigenetically edited chromosome in a cell are methylated as compared to the original state of the chromosome or the chromosome in a comparable cell not contacted with the epigenetic editor. In some embodiments, at least 5%, 6%, 7%, 8%, 9%, 10%, 15%, 20%, 25%, 30%, 35%, 40%, 45%, 50%, 55%, 60%, 65%, 70%, 75%, 80%, 85%, 90%, 95%, 96%, 97%, 98%, or 99% of histone tails of histones bound to DNAs within 2000 bps flanking a enhancer sequence, isolator sequence, or CTCF binding sequence of a gene in the epigenetically edited chromosome in a cell are methylated as compared to the original state of the chromosome or the chromosome in a comparable cell not contacted with the epigenetic editor. In some embodiments, one single histone tail of histones bound to DNAs within 2000 bps flanking a enhancer sequence, isolator sequence, or CTCF binding sequence of a gene in the epigenetically edited chromosome in a cell is methylated as compared to the original state of the chromosome or the chromosome in a comparable cell not contacted with the epigenetic editor. In some embodiments, one single histone octamer bound to DNAs within 2000 bps flanking a enhancer sequence, isolator sequence, or CTCF binding sequence of a gene in the epigenetically edited chromosome in a cell is methylated as compared to the original state of the chromosome or the chromosome in a comparable cell not contacted with the epigenetic editor. In some embodiments, the histone is histone H3 and methylation is at Lysine 9, marking the target gene in the epigenetically edited chromosome for repressed expression. In some embodiments, the histone is histone H3 and methylation is at Lysine 4, marking the target gene in the epigenetically edited chromosome for increased expression.

[0274] In some embodiments, all histone tails of histones bound to DNA nucleotides within 2000 bps flanking a enhancer sequence, isolator sequence, or CTCF binding sequence of a target gene in the epigenetically edited chromosome in a cell are demethylated as compared to the original state of the chromosome or the chromosome in a comparable cell not contacted with the epigenetic editor. In some embodiments, at least 1, 2, 3, 4, 5, 6, 7, 8, 9, 10, 11, 12, 13, 14, 15, 16, 17, 18, 19, 20, 25, 30, 35, 40, 45, 50, 55, 60, 65, 70, 75, 80, 85, 90, 95, 100, 105, 110, 115, 120 or more histone tails of histones bound to DNAs within 2000 bps flanking a enhancer sequence, isolator sequence, or CTCF binding sequence of a gene in the epigenetically edited chromosome in a cell are demethylated as compared to the original state of the chromosome or the chromosome in a comparable cell not contacted with the epigenetic editor. In some embodiments, at least 5%, 6%, 7%, 8%, 9%, 10%, 15%, 20%, 25%, 30%, 35%, 40%, 45%, 50%, 55%, 60%, 65%, 70%, 75%, 80%, 85%, 90%, 95%, 96%, 97%, 98%, or 99% of histone tails of histones bound to DNAs within 2000 bps flanking a enhancer sequence, isolator sequence, or CTCF binding sequence of a gene in the epigenetically edited chromosome in a cell are demethylated as compared to the original state of the chromosome or the chromosome in a comparable cell not contacted with the epigenetic editor. In some embodiments, one single histone tail of histones bound to DNAs within 2000 bps flanking a enhancer sequence, isolator sequence, or CTCF binding sequence of a gene in the epigenetically edited chromosome in a cell is demethylated as compared to the original state of the chromosome or the chromosome in a comparable cell not contacted with the epigenetic editor. In some embodiments, one single histone octamer bound to DNAs within 2000 bps flanking a enhancer sequence, isolator sequence, or CTCF binding sequence of a gene in the epigenetically edited chromosome in a cell is demethylated as compared to the original state of the chromosome or the chromosome in a comparable cell not contacted with the epigenetic editor. In some embodiments, the histone is histone H3 and methylation is at Lysine 9, marking the target gene in the epigenetically edited chromosome for repressed expression. In some embodiments, the histone is histone H3 and methylation is at Lysine 4, marking the target gene in the epigenetically edited chromosome for increased expression.

[0275] In some embodiments, all histone tails of histones bound to DNA nucleotides within 2000 bps flanking a enhancer sequence, isolator sequence, or CTCF binding sequence of a target gene in the epigenetically edited chromosome in a cell are acetylated as compared to the original state of the chromosome or the chromosome in a comparable cell not contacted with the epigenetic editor. In some embodiments, at least 1, 2, 3, 4, 5, 6, 7, 8, 9, 10, 11, 12, 13, 14, 15, 16, 17, 18, 19, 20, 25, 30, 35, 40, 45, 50, 55, 60, 65, 70, 75, 80, 85, 90, 95, 100, 105, 110, 115, 120 or more histone tails of histones bound to DNAs within 2000 bps flanking a enhancer sequence, isolator sequence, or CTCF binding sequence of a gene in the epigenetically edited chromosome in a cell are acetylated as compared to the original state of the chromosome or the chromosome in a comparable cell not contacted with the epigenetic editor. In some embodiments, at least 5%, 6%, 7%, 8%, 9%, 10%, 15%, 20%, 25%, 30%, 35%, 40%, 45%, 50%, 55%, 60%, 65%, 70%, 75%, 80%, 85%, 90%, 95%, 96%, 97%, 98%, or 99% of histone tails of histones bound to DNAs within 2000 bps flanking a enhancer sequence, isolator sequence, or CTCF binding sequence of a gene in the epigenetically edited chromosome in a cell are acetylated as compared to the original state of the chromosome or the chromosome in a comparable cell not contacted with the epigenetic editor. In some embodiments, one single histone tail of histones bound to DNAs within 2000 bps flanking a enhancer sequence, isolator sequence, or CTCF binding sequence of a gene in the epigenetically edited chromosome in a cell is acetylated as compared to the original state of the chromosome or the chromosome in a comparable cell not contacted with the epigenetic editor. In some embodiments, one single histone octamer bound to DNAs within 2000 bps flanking a enhancer sequence, isolator sequence, or CTCF binding sequence of a gene in the epigenetically edited chromosome in a cell is acetylated as compared to the original state of the chromosome or the chromosome in a comparable cell not contacted with the epigenetic editor.

[0276] In some embodiments, all histone tails of histones bound to DNA nucleotides within 2000 bps flanking a enhancer sequence, isolator sequence, or CTCF binding sequence of a target gene in the epigenetically edited chromosome in a cell are deacetylated as compared to the original state of the chromosome or the chromosome in a comparable cell not contacted with the epigenetic editor. In some embodiments, at least 1, 2, 3, 4, 5, 6, 7, 8, 9, 10, 11, 12, 13, 14, 15, 16, 17, 18, 19, 20, 25, 30, 35, 40, 45, 50, 55, 60, 65, 70, 75, 80, 85, 90, 95, 100, 105, 110, 115, 120 or more histone tails of histones bound to DNAs within 2000 bps flanking a enhancer sequence, isolator sequence, or CTCF binding sequence of a gene in the epigenetically edited chromosome in a cell are deacetylated as compared to the original state of the chromosome or the chromosome in a comparable cell not contacted with the epigenetic editor. In some embodiments, at least 5%, 6%, 7%, 8%, 9%, 10%, 15%, 20%, 25%, 30%, 35%, 40%, 45%, 50%, 55%, 60%, 65%, 70%, 75%, 80%, 85%, 90%, 95%, 96%, 97%, 98%, or 99% of histone tails of histones bound to DNAs within 2000 bps flanking a enhancer sequence, isolator sequence, or CTCF binding sequence of a gene in the epigenetically edited chromosome in a cell are deacetylated as compared to the original state of the chromosome or the chromosome in a comparable cell not contacted with the epigenetic editor. In some embodiments, one single histone tail of histones bound to DNAs within 2000 bps flanking a enhancer sequence, isolator sequence, or CTCF binding sequence of a gene in the epigenetically edited chromosome in a cell is deacetylated as compared to the original state of the chromosome or the chromosome in a comparable cell not contacted with the epigenetic editor. In some embodiments, one single histone octamer bound to DNAs within 2000 bps flanking a enhancer sequence, isolator sequence, or CTCF binding sequence of a gene in the epigenetically edited chromosome in a cell is deacetylated as compared to the original state of the chromosome or the chromosome in a comparable cell not contacted with the epigenetic editor.

[0277] In some embodiments, all CpG dinucleotides within 1500 bp flanking a enhancer sequence, an isolator sequence, or a CTCF binding sequence of a gene in the epigenetically edited chromosome in a cell are methylated as compared to the original state of the gene or the gene in a comparable cell not contacted with the epigenetic editor. In some embodiments, at least 1, 2, 3, 4, 5, 6, 7, 8, 9, 10, 11, 12, 13, 14, 15, 16, 17, 18, 19, 20, 25, 30, 35, 40, 45, 50, 60, 70, 80, 90, 100, 150, 200, 250, 300, 350, 400, 450, 550, 500, 600, 650, 700 or more CpG dinucleotides within 1500 bps flanking a enhancer sequence, an isolator sequence, or a CTCF binding sequence of a gene in the epigenetically edited chromosome in a cell are methylated as compared to the original state of the gene or the gene in a comparable cell not contacted with the epigenetic editor. In some embodiments, at least 5%, 6%, 7%, 8%, 9%, 10%, 15%, 20%, 25%, 30%, 35%, 40%, 45%, 50%, 55%, 60%, 65%, 70%, 75%, 80%, 85%, 90%, 95%, 96%, 97%, 98%, or 99% of CpG dinucleotides within 1500 bps flanking a enhancer sequence, an isolator sequence, or a CTCF binding sequence of a gene in the epigenetically edited chromosome in a cell are methylated as compared to the original state of the gene or the gene in a comparable cell not contacted with the epigenetic editor. In some embodiments, one single CpG dinucleotide within 1500 bps flanking a enhancer sequence, an isolator sequence, or a CTCF binding sequence of a gene in the epigenetically edited chromosome in a cell is methylated as compared to the original state of the gene or the gene in a comparable cell not contacted with the epigenetic editor.

[0278] In some embodiments, all CpG dinucleotides within 1500 bps flanking a enhancer sequence, isolator sequence, or CTCF binding sequence of a gene in the epigenetically edited chromosome in a cell are demethylated as compared to the original state of the gene or the gene in a comparable cell not contacted with the epigenetic editor. In some embodiments, at least 1, 2, 3, 4, 5, 6, 7, 8, 9, 10, 11, 12, 13, 14, 15, 16, 17, 18, 19, 20, 25, 30, 35, 40, 45, 50, 60, 70, 80, 90, 100, 150, 200, 250, 300, 350, 400, 450, 500, 550, 600, 650, 700 or more CpG dinucleotides within 1500 bps flanking a enhancer sequence, isolator sequence, or CTCF binding sequence of a gene in the epigenetically edited chromosome in a cell are demethylated as compared to the original state of the gene or the gene in a comparable cell not contacted with the epigenetic editor. In some embodiments, at least 5%, 6%, 7%, 8%, 9%, 10%, 15%, 20%, 25%, 30%, 35%, 40%, 45%, 50%, 55%, 60%, 65%, 70%, 75%, 80%, 85%, 90%, 95%, 96%, 97%, 98%, or 99% of CpG dinucleotides within 1500 bps flanking a enhancer sequence, isolator sequence, or CTCF binding sequence of a gene in the epigenetically edited chromosome in a cell are demethylated as compared to the original state of the gene or the gene in a comparable cell not contacted with the epigenetic editor. In some embodiments, one single CpG dinucleotide within 1500 bps flanking a enhancer sequence, isolator sequence, or CTCF binding sequence of a gene in the epigenetically edited chromosome in a cell is demethylated as compared to the original state of the gene or the gene in a comparable cell not contacted with the epigenetic editor.

[0279] In some embodiments, all histone tails of histones bound to DNA nucleotides within 1500 bps flanking a enhancer sequence, isolator sequence, or CTCF binding sequence of a target gene in the epigenetically edited chromosome in a cell are methylated as compared to the original state of the chromosome or the chromosome in a comparable cell not contacted with the epigenetic editor. In some embodiments, at least 1, 2, 3, 4, 5, 6, 7, 8, 9, 10, 11, 12, 13, 14, 15, 16, 17, 18, 19, 20, 25, 30, 35, 40, 45, 50, 55, 60, 65, 70, 75, 80, 85, 90 or more histone tails of histones bound to DNAs within 1500 bps flanking a enhancer sequence, isolator sequence, or CTCF binding sequence of a gene in the epigenetically edited chromosome in a cell are methylated as compared to the original state of the chromosome or the chromosome in a comparable cell not contacted with the epigenetic editor. In some embodiments, at least 5%, 6%, 7%, 8%, 9%, 10%, 15%, 20%, 25%, 30%, 35%, 40%, 45%, 50%, 55%, 60%, 65%, 70%, 75%, 80%, 85%, 90%, 95%, 96%, 97%, 98%, or 99% of histone tails of histones bound to DNAs within 1500 bps flanking a enhancer sequence, isolator sequence, or CTCF binding sequence of a gene in the epigenetically edited chromosome in a cell are methylated as compared to the original state of the chromosome or the chromosome in a comparable cell not contacted with the epigenetic editor. In some embodiments, one single histone tail of histones bound to DNAs within 1500 bps flanking a enhancer sequence, isolator sequence, or CTCF binding sequence of a gene in the epigenetically edited chromosome in a cell is methylated as compared to the original state of the chromosome or the chromosome in a comparable cell not contacted with the epigenetic editor. In some embodiments, one single histone octamer bound to DNAs within 1500 bps flanking a enhancer sequence, isolator sequence, or CTCF binding sequence of a gene in the epigenetically edited chromosome in a cell is methylated as compared to the original state of the chromosome or the chromosome in a comparable cell not contacted with the epigenetic editor. In some embodiments, the histone is histone H3 and methylation is at Lysine 9, marking the target gene in the epigenetically edited chromosome for repressed expression. In some embodiments, the histone is histone H3 and methylation is at Lysine 4, marking the target gene in the epigenetically edited chromosome for increased expression.

[0280] In some embodiments, all histone tails of histones bound to DNA nucleotides within 1500 bps flanking a enhancer sequence, isolator sequence, or CTCF binding sequence of a target gene in the epigenetically edited chromosome in a cell are demethylated as compared to the original state of the chromosome or the chromosome in a comparable cell not contacted with the epigenetic editor. In some embodiments, at least 1, 2, 3, 4, 5, 6, 7, 8, 9, 10, 11, 12, 13, 14, 15, 16, 17, 18, 19, 20, 25, 30, 35, 40, 45, 50, 55, 60, 65, 70, 75, 80, 85, 90 or more histone tails of histones bound to DNAs within 1500 bps flanking a enhancer sequence, isolator sequence, or CTCF binding sequence of a gene in the epigenetically edited chromosome in a cell are demethylated as compared to the original state of the chromosome or the chromosome in a comparable cell not contacted with the epigenetic editor. In some embodiments, at least 5%, 6%, 7%, 8%, 9%, 10%, 15%, 20%, 25%, 30%, 35%, 40%, 45%, 50%, 55%, 60%, 65%, 70%, 75%, 80%, 85%, 90%, 95%, 96%, 97%, 98%, or 99% of histone tails of histones bound to DNAs within 1500 bps flanking a enhancer sequence, isolator sequence, or CTCF binding sequence of a gene in the epigenetically edited chromosome in a cell are demethylated as compared to the original state of the chromosome or the chromosome in a comparable cell not contacted with the epigenetic editor. In some embodiments, one single histone tail of histones bound to DNAs within 1500 bps flanking a enhancer sequence, isolator sequence, or CTCF binding sequence of a gene in the epigenetically edited chromosome in a cell is demethylated as compared to the original state of the chromosome or the chromosome in a comparable cell not contacted with the epigenetic editor. In some embodiments, one single histone octamer bound to DNAs within 1500 bps flanking a enhancer sequence, isolator sequence, or CTCF binding sequence of a gene in the epigenetically edited chromosome in a cell is demethylated as compared to the original state of the chromosome or the chromosome in a comparable cell not contacted with the epigenetic editor. In some embodiments, the histone is histone H3 and methylation is at Lysine 9, marking the target gene in the epigenetically edited chromosome for repressed expression. In some embodiments, the histone is histone H3 and methylation is at Lysine 4, marking the target gene in the epigenetically edited chromosome for increased expression.

[0281] In some embodiments, all histone tails of histones bound to DNA nucleotides within 1500 bps flanking a enhancer sequence, isolator sequence, or CTCF binding sequence of a target gene in the epigenetically edited chromosome in a cell are acetylated as compared to the original state of the chromosome or the chromosome in a comparable cell not contacted with the epigenetic editor. In some embodiments, at least 1, 2, 3, 4, 5, 6, 7, 8, 9, 10, 11, 12, 13, 14, 15, 16, 17, 18, 19, 20, 25, 30, 35, 40, 45, 50, 55, 60, 65, 70, 75, 80, 85, 90 or more histone tails of histones bound to DNAs within 1500 bps flanking a enhancer sequence, isolator sequence, or CTCF binding sequence of a gene in the epigenetically edited chromosome in a cell are acetylated as compared to the original state of the chromosome or the chromosome in a comparable cell not contacted with the epigenetic editor. In some embodiments, at least 5%, 6%, 7%, 8%, 9%, 10%, 15%, 20%, 25%, 30%, 35%, 40%, 45%, 50%, 55%, 60%, 65%, 70%, 75%, 80%, 85%, 90%, 95%, 96%, 97%, 98%, or 99% of histone tails of histones bound to DNAs within 1500 bps flanking a enhancer sequence, isolator sequence, or CTCF binding sequence of a gene in the epigenetically edited chromosome in a cell are acetylated as compared to the original state of the chromosome or the chromosome in a comparable cell not contacted with the epigenetic editor. In some embodiments, one single histone tail of histones bound to DNAs within 1500 bps flanking a enhancer sequence, isolator sequence, or CTCF binding sequence of a gene in the epigenetically edited chromosome in a cell is acetylated as compared to the original state of the chromosome or the chromosome in a comparable cell not contacted with the epigenetic editor. In some embodiments, one single histone octamer bound to DNAs within 1500 bps flanking a enhancer sequence, isolator sequence, or CTCF binding sequence of a gene in the epigenetically edited chromosome in a cell is acetylated as compared to the original state of the chromosome or the chromosome in a comparable cell not contacted with the epigenetic editor.

[0282] In some embodiments, all histone tails of histones bound to DNA nucleotides within 1500 bps flanking a enhancer sequence, isolator sequence, or CTCF binding sequence of a target gene in the epigenetically edited chromosome in a cell are deacetylated as compared to the original state of the chromosome or the chromosome in a comparable cell not contacted with the epigenetic editor. In some embodiments, at least 1, 2, 3, 4, 5, 6, 7, 8, 9, 10, 11, 12, 13, 14, 15, 16, 17, 18, 19, 20, 25, 30, 35, 40, 45, 50, 55, 60, 65, 70, 75, 80, 85, 90 or more histone tails of histones bound to DNAs within 1500 bps flanking a enhancer sequence, isolator sequence, or CTCF binding sequence of a gene in the epigenetically edited chromosome in a cell are deacetylated as compared to the original state of the chromosome or the chromosome in a comparable cell not contacted with the epigenetic editor. In some embodiments, at least 5%, 6%, 7%, 8%, 9%, 10%, 15%, 20%, 25%, 30%, 35%, 40%, 45%, 50%, 55%, 60%, 65%, 70%, 75%, 80%, 85%, 90%, 95%, 96%, 97%, 98%, or 99% of histone tails of histones bound to DNAs within 1500 bps flanking a enhancer sequence, isolator sequence, or CTCF binding sequence of a gene in the epigenetically edited chromosome in a cell are deacetylated as compared to the original state of the chromosome or the chromosome in a comparable cell not contacted with the epigenetic editor. In some embodiments, one single histone tail of histones bound to DNAs within 1500 bps flanking a enhancer sequence, isolator sequence, or CTCF binding sequence of a gene in the epigenetically edited chromosome in a cell is deacetylated as compared to the original state of the chromosome or the chromosome in a comparable cell not contacted with the epigenetic editor. In some embodiments, one single histone octamer bound to DNAs within 1500 bps flanking a enhancer sequence, isolator sequence, or CTCF binding sequence of a gene in the epigenetically edited chromosome in a cell is deacetylated as compared to the original state of the chromosome or the chromosome in a comparable cell not contacted with the epigenetic editor.

[0283] In some embodiments, all CpG dinucleotides within 1000 bps flanking a enhancer sequence, an isolator sequence, or a CTCF binding sequence of a gene in the epigenetically edited chromosome in a cell are methylated as compared to the original state of the gene or the gene in a comparable cell not contacted with the epigenetic editor. In some embodiments, at least 1, 2, 3, 4, 5, 6, 7, 8, 9, 10, 11, 12, 13, 14, 15, 16, 17, 18, 19, 20, 25, 30, 35, 40, 45, 50, 60, 70, 80, 90, 100, 150, 200, 250, 300, 350, 400, 450, 500 or more CpG dinucleotides within 1000 bps flanking a enhancer sequence, an isolator sequence, or a CTCF binding sequence of a gene in the epigenetically edited chromosome in a cell are methylated as compared to the original state of the gene or the gene in a comparable cell not contacted with the epigenetic editor. In some embodiments, at least 5%, 6%, 7%, 8%, 9%, 10%, 15%, 20%, 25%, 30%, 35%, 40%, 45%, 50%, 55%, 60%, 65%, 70%, 75%, 80%, 85%, 90%, 95%, 96%, 97%, 98%, or 99% of CpG dinucleotides within 1000 bps flanking a enhancer sequence, an isolator sequence, or a CTCF binding sequence of a gene in the epigenetically edited chromosome in a cell are methylated as compared to the original state of the gene or the gene in a comparable cell not contacted with the epigenetic editor. In some embodiments, one single CpG dinucleotide within 1000 bps flanking a enhancer sequence, an isolator sequence, or a CTCF binding sequence of a gene in the epigenetically edited chromosome in a cell is methylated as compared to the original state of the gene or the gene in a comparable cell not contacted with the epigenetic editor.

[0284] In some embodiments, all CpG dinucleotides within 1000 bps flanking a enhancer sequence, isolator sequence, or CTCF binding sequence of a gene in the epigenetically edited chromosome in a cell are demethylated as compared to the original state of the gene or the gene in a comparable cell not contacted with the epigenetic editor. In some embodiments, at least 1, 2, 3, 4, 5, 6, 7, 8, 9, 10, 11, 12, 13, 14, 15, 16, 17, 18, 19, 20, 25, 30, 35, 40, 45, 50, 60, 70, 80, 90, 100, 150, 200, 250, 300, 350, 400, 450, 500 or more CpG dinucleotides within 1000 bps flanking a enhancer sequence, isolator sequence, or CTCF binding sequence of a gene in the epigenetically edited chromosome in a cell are demethylated as compared to the original state of the gene or the gene in a comparable cell not contacted with the epigenetic editor. In some embodiments, at least 5%, 6%, 7%, 8%, 9%, 10%, 15%, 20%, 25%, 30%, 35%, 40%, 45%, 50%, 55%, 60%, 65%, 70%, 75%, 80%, 85%, 90%, 95%, 96%, 97%, 98%, or 99% of CpG dinucleotides within 1000 bps flanking a enhancer sequence, isolator sequence, or CTCF binding sequence of a gene in the epigenetically edited chromosome in a cell are demethylated as compared to the original state of the gene or the gene in a comparable cell not contacted with the epigenetic editor. In some embodiments, one single CpG dinucleotide within 1000 bps flanking a enhancer sequence, isolator sequence, or CTCF binding sequence of a gene in the epigenetically edited chromosome in a cell is demethylated as compared to the original state of the gene or the gene in a comparable cell not contacted with the epigenetic editor.

[0285] In some embodiments, all histone tails of histones bound to DNA nucleotides within 1000 bps flanking a enhancer sequence, isolator sequence, or CTCF binding sequence of a target gene in the epigenetically edited chromosome in a cell are methylated as compared to the original state of the chromosome or the chromosome in a comparable cell not contacted with the epigenetic editor. In some embodiments, at least 1, 2, 3, 4, 5, 6, 7, 8, 9, 10, 11, 12, 13, 14, 15, 16, 17, 18, 19, 20, 25, 30, 35, 40, 45, 50, 55, 60 or more histone tails of histones bound to DNAs within 1000 bps flanking a enhancer sequence, isolator sequence, or CTCF binding sequence of a gene in the epigenetically edited chromosome in a cell are methylated as compared to the original state of the chromosome or the chromosome in a comparable cell not contacted with the epigenetic editor. In some embodiments, at least 5%, 6%, 7%, 8%, 9%, 10%, 15%, 20%, 25%, 30%, 35%, 40%, 45%, 50%, 55%, 60%, 65%, 70%, 75%, 80%, 85%, 90%, 95%, 96%, 97%, 98%, or 99% of histone tails of histones bound to DNAs within 1000 bps flanking a enhancer sequence, isolator sequence, or CTCF binding sequence of a gene in the epigenetically edited chromosome in a cell are methylated as compared to the original state of the chromosome or the chromosome in a comparable cell not contacted with the epigenetic editor. In some embodiments, one single histone tail of histones bound to DNAs within 1000 bps flanking a enhancer sequence, isolator sequence, or CTCF binding sequence of a gene in the epigenetically edited chromosome in a cell is methylated as compared to the original state of the chromosome or the chromosome in a comparable cell not contacted with the epigenetic editor. In some embodiments, one single histone octamer bound to DNAs within 1000 bps flanking a enhancer sequence, isolator sequence, or CTCF binding sequence of a gene in the epigenetically edited chromosome in a cell is methylated as compared to the original state of the chromosome or the chromosome in a comparable cell not contacted with the epigenetic editor. In some embodiments, the histone is histone H3 and methylation is at Lysine 9, marking the target gene in the epigenetically edited chromosome for repressed expression. In some embodiments, the histone is histone H3 and methylation is at Lysine 4, marking the target gene in the epigenetically edited chromosome for increased expression.

[0286] In some embodiments, all histone tails of histones bound to DNA nucleotides within 1000 bps flanking a enhancer sequence, isolator sequence, or CTCF binding sequence of a target gene in the epigenetically edited chromosome in a cell are demethylated as compared to the original state of the chromosome or the chromosome in a comparable cell not contacted with the epigenetic editor. In some embodiments, at least 1, 2, 3, 4, 5, 6, 7, 8, 9, 10, 11, 12, 13, 14, 15, 16, 17, 18, 19, 20, 25, 30, 35, 40, 45, 50, 55, 60 or more histone tails of histones bound to DNAs within 1000 bps flanking a enhancer sequence, isolator sequence, or CTCF binding sequence of a gene in the epigenetically edited chromosome in a cell are demethylated as compared to the original state of the chromosome or the chromosome in a comparable cell not contacted with the epigenetic editor. In some embodiments, at least 5%, 6%, 7%, 8%, 9%, 10%, 15%, 20%, 25%, 30%, 35%, 40%, 45%, 50%, 55%, 60%, 65%, 70%, 75%, 80%, 85%, 90%, 95%, 96%, 97%, 98%, or 99% of histone tails of histones bound to DNAs within 1000 bps flanking a enhancer sequence, isolator sequence, or CTCF binding sequence of a gene in the epigenetically edited chromosome in a cell are demethylated as compared to the original state of the chromosome or the chromosome in a comparable cell not contacted with the epigenetic editor. In some embodiments, one single histone tail of histones bound to DNAs within 1000 bps flanking a enhancer sequence, isolator sequence, or CTCF binding sequence of a gene in the epigenetically edited chromosome in a cell is demethylated as compared to the original state of the chromosome or the chromosome in a comparable cell not contacted with the epigenetic editor. In some embodiments, one single histone octamer bound to DNAs within 1000 bps flanking a enhancer sequence, isolator sequence, or CTCF binding sequence of a gene in the epigenetically edited chromosome in a cell is demethylated as compared to the original state of the chromosome or the chromosome in a comparable cell not contacted with the epigenetic editor. In some embodiments, the histone is histone H3 and methylation is at Lysine 9, marking the target gene in the epigenetically edited chromosome for repressed expression. In some embodiments, the histone is histone H3 and methylation is at Lysine 4, marking the target gene in the epigenetically edited chromosome for increased expression.

[0287] In some embodiments, all histone tails of histones bound to DNA nucleotides within 1000 bps flanking a enhancer sequence, isolator sequence, or CTCF binding sequence of a target gene in the epigenetically edited chromosome in a cell are acetylated as compared to the original state of the chromosome or the chromosome in a comparable cell not contacted with the epigenetic editor. In some embodiments, at least 1, 2, 3, 4, 5, 6, 7, 8, 9, 10, 11, 12, 13, 14, 15, 16, 17, 18, 19, 20, 25, 30, 35, 40, 45, 50, 55, 60 or more histone tails of histones bound to DNAs within 1000 bps flanking a enhancer sequence, isolator sequence, or CTCF binding sequence of a gene in the epigenetically edited chromosome in a cell are acetylated as compared to the original state of the chromosome or the chromosome in a comparable cell not contacted with the epigenetic editor. In some embodiments, at least 5%, 6%, 7%, 8%, 9%, 10%, 15%, 20%, 25%, 30%, 35%, 40%, 45%, 50%, 55%, 60%, 65%, 70%, 75%, 80%, 85%, 90%, 95%, 96%, 97%, 98%, or 99% of histone tails of histones bound to DNAs within 1000 bps flanking a enhancer sequence, isolator sequence, or CTCF binding sequence of a gene in the epigenetically edited chromosome in a cell are acetylated as compared to the original state of the chromosome or the chromosome in a comparable cell not contacted with the epigenetic editor. In some embodiments, one single histone tail of histones bound to DNAs within 1000 bps flanking a enhancer sequence, isolator sequence, or CTCF binding sequence of a gene in the epigenetically edited chromosome in a cell is acetylated as compared to the original state of the chromosome or the chromosome in a comparable cell not contacted with the epigenetic editor. In some embodiments, one single histone octamer bound to DNAs within 1000 bps flanking a enhancer sequence, isolator sequence, or CTCF binding sequence of a gene in the epigenetically edited chromosome in a cell is acetylated as compared to the original state of the chromosome or the chromosome in a comparable cell not contacted with the epigenetic editor.

[0288] In some embodiments, all histone tails of histones bound to DNA nucleotides within 1000 bps flanking a enhancer sequence, isolator sequence, or CTCF binding sequence of a target gene in the epigenetically edited chromosome in a cell are deacetylated as compared to the original state of the chromosome or the chromosome in a comparable cell not contacted with the epigenetic editor. In some embodiments, at least 1, 2, 3, 4, 5, 6, 7, 8, 9, 10, 11, 12, 13, 14, 15, 16, 17, 18, 19, 20, 25, 30, 35, 40, 45, 50, 55, 60 or more histone tails of histones bound to DNAs within 1000 bps flanking a enhancer sequence, isolator sequence, or CTCF binding sequence of a gene in the epigenetically edited chromosome in a cell are deacetylated as compared to the original state of the chromosome or the chromosome in a comparable cell not contacted with the epigenetic editor. In some embodiments, at least 5%, 6%, 7%, 8%, 9%, 10%, 15%, 20%, 25%, 30%, 35%, 40%, 45%, 50%, 55%, 60%, 65%, 70%, 75%, 80%, 85%, 90%, 95%, 96%, 97%, 98%, or 99% of histone tails of histones bound to DNAs within 1000 bps flanking a enhancer sequence, isolator sequence, or CTCF binding sequence of a gene in the epigenetically edited chromosome in a cell are deacetylated as compared to the original state of the chromosome or the chromosome in a comparable cell not contacted with the epigenetic editor. In some embodiments, one single histone tail of histones bound to DNAs within 1000 bps flanking a enhancer sequence, isolator sequence, or CTCF binding sequence of a gene in the epigenetically edited chromosome in a cell is deacetylated as compared to the original state of the chromosome or the chromosome in a comparable cell not contacted with the epigenetic editor. In some embodiments, one single histone octamer bound to DNAs within 1000 bps flanking a enhancer sequence, isolator sequence, or CTCF binding sequence of a gene in the epigenetically edited chromosome in a cell is deacetylated as compared to the original state of the chromosome or the chromosome in a comparable cell not contacted with the epigenetic editor.

[0289] In some embodiments, all CpG dinucleotides within 500 bps flanking a enhancer sequence, an isolator sequence, or a CTCF binding sequence of a gene in the epigenetically edited chromosome in a cell are methylated as compared to the original state of the gene or the gene in a comparable cell not contacted with the epigenetic editor. In some embodiments, at least 1, 2, 3, 4, 5, 6, 7, 8, 9, 10, 11, 12, 13, 14, 15, 16, 17, 18, 19, 20, 25, 30, 35, 40, 45, 50, 60, 70, 80, 90, 100, 150, 200 or more CpG dinucleotides within 500 bps flanking a enhancer sequence, an isolator sequence, or a CTCF binding sequence of a gene in the epigenetically edited chromosome in a cell are methylated as compared to the original state of the gene or the gene in a comparable cell not contacted with the epigenetic editor. In some embodiments, at least 5%, 6%, 7%, 8%, 9%, 10%, 15%, 20%, 25%, 30%, 35%, 40%, 45%, 50%, 55%, 60%, 65%, 70%, 75%, 80%, 85%, 90%, 95%, 96%, 97%, 98%, or 99% of CpG dinucleotides within 500 bps flanking a enhancer sequence, an isolator sequence, or a CTCF binding sequence of a gene in the epigenetically edited chromosome in a cell are methylated as compared to the original state of the gene or the gene in a comparable cell not contacted with the epigenetic editor. In some embodiments, one single CpG dinucleotide within 500 bps flanking a enhancer sequence, an isolator sequence, or a CTCF binding sequence of a gene in the epigenetically edited chromosome in a cell is methylated as compared to the original state of the gene or the gene in a comparable cell not contacted with the epigenetic editor.

[0290] In some embodiments, all CpG dinucleotides within 500 bps flanking a enhancer sequence, isolator sequence, or CTCF binding sequence of a gene in the epigenetically edited chromosome in a cell are demethylated as compared to the original state of the gene or the gene in a comparable cell not contacted with the epigenetic editor. In some embodiments, at least 1, 2, 3, 4, 5, 6, 7, 8, 9, 10, 11, 12, 13, 14, 15, 16, 17, 18, 19, 20, 25, 30, 35, 40, 45, 50, 60, 70, 80, 90, 100, 150, 200 or more CpG dinucleotides within 500 bps flanking a enhancer sequence, isolator sequence, or CTCF binding sequence of a gene in the epigenetically edited chromosome in a cell are demethylated as compared to the original state of the gene or the gene in a comparable cell not contacted with the epigenetic editor. In some embodiments, at least 5%, 6%, 7%, 8%, 9%, 10%, 15%, 20%, 25%, 30%, 35%, 40%, 45%, 50%, 55%, 60%, 6%, 70%, 75%, 80%, 85%, 90%, 95%, 96%, 97%, 98%, or 99% of CpG dinucleotides within 500 bps flanking a enhancer sequence, isolator sequence, or CTCF binding sequence of a gene in the epigenetically edited chromosome in a cell are demethylated as compared to the original state of the gene or the gene in a comparable cell not contacted with the epigenetic editor. In some embodiments, one single CpG dinucleotide within 500 bps flanking a enhancer sequence, isolator sequence, or CTCF binding sequence of a gene in the epigenetically edited chromosome in a cell is demethylated as compared to the original state of the gene or the gene in a comparable cell not contacted with the epigenetic editor.

[0291] In some embodiments, all histone tails of histones bound to DNA nucleotides within 500 bps flanking a enhancer sequence, isolator sequence, or CTCF binding sequence of a target gene in the epigenetically edited chromosome in a cell are methylated as compared to the original state of the chromosome or the chromosome in a comparable cell not contacted with the epigenetic editor. In some embodiments, at least 1, 2, 3, 4, 5, 6, 7, 8, 9, 10, 11, 12, 13, 14, 15, 16, 17, 18, 19, 20, 25, 30 or more histone tails of histones bound to DNAs within 500 bps flanking a enhancer sequence, isolator sequence, or CTCF binding sequence of a gene in the epigenetically edited chromosome in a cell are methylated as compared to the original state of the chromosome or the chromosome in a comparable cell not contacted with the epigenetic editor. In some embodiments, at least 5%, 6%, 7%, 8%, 9%, 10%, 15%, 20%, 25%, 30%, 35%, 40%, 45%, 50%, 55%, 60%, 65%, 70%, 75%, 80%, 85%, 90%, 95%, 96%, 97%, 98%, or 99% of histone tails of histones bound to DNAs within 500 bps flanking a enhancer sequence, isolator sequence, or CTCF binding sequence of a gene in the epigenetically edited chromosome in a cell are methylated as compared to the original state of the chromosome or the chromosome in a comparable cell not contacted with the epigenetic editor. In some embodiments, one single histone tail of histones bound to DNAs within 500 bps flanking a enhancer sequence, isolator sequence, or CTCF binding sequence of a gene in the epigenetically edited chromosome in a cell is methylated as compared to the original state of the chromosome or the chromosome in a comparable cell not contacted with the epigenetic editor. In some embodiments, one single histone octamer bound to DNAs within 500 bps flanking a enhancer sequence, isolator sequence, or CTCF binding sequence of a gene in the epigenetically edited chromosome in a cell is methylated as compared to the original state of the chromosome or the chromosome in a comparable cell not contacted with the epigenetic editor. In some embodiments, the histone is histone H3 and methylation is at Lysine 9, marking the target gene in the epigenetically edited chromosome for repressed expression. In some embodiments, the histone is histone H3 and methylation is at Lysine 4, marking the target gene in the epigenetically edited chromosome for increased expression.

[0292] In some embodiments, all histone tails of histones bound to DNA nucleotides within 500 bps flanking a enhancer sequence, isolator sequence, or CTCF binding sequence of a target gene in the epigenetically edited chromosome in a cell are demethylated as compared to the original state of the chromosome or the chromosome in a comparable cell not contacted with the epigenetic editor. In some embodiments, at least 1, 2, 3, 4, 5, 6, 7, 8, 9, 10, 11, 12, 13, 14, 15, 16, 17, 18, 19, 20, 25, 30 or more histone tails of histones bound to DNAs within 500 bps flanking a enhancer sequence, isolator sequence, or CTCF binding sequence of a gene in the epigenetically edited chromosome in a cell are demethylated as compared to the original state of the chromosome or the chromosome in a comparable cell not contacted with the epigenetic editor. In some embodiments, at least 5%, 6%, 7%, 8%, 9%, 10%, 15%, 20%, 25%, 30%, 35%, 40%, 45%, 50%, 55%, 60%, 65%, 70%, 75%, 80%, 85%, 90%, 95%, 96%, 97%, 98%, or 99% of histone tails of histones bound to DNAs within 500 bps flanking a enhancer sequence, isolator sequence, or CTCF binding sequence of a gene in the epigenetically edited chromosome in a cell are demethylated as compared to the original state of the chromosome or the chromosome in a comparable cell not contacted with the epigenetic editor. In some embodiments, one single histone tail of histones bound to DNAs within 500 bps flanking a enhancer sequence, isolator sequence, or CTCF binding sequence of a gene in the epigenetically edited chromosome in a cell is demethylated as compared to the original state of the chromosome or the chromosome in a comparable cell not contacted with the epigenetic editor. In some embodiments, one single histone octamer bound to DNAs within 500 bps flanking a enhancer sequence, isolator sequence, or CTCF binding sequence of a gene in the epigenetically edited chromosome in a cell is demethylated as compared to the original state of the chromosome or the chromosome in a comparable cell not contacted with the epigenetic editor. In some embodiments, the histone is histone H3 and methylation is at Lysine 9, marking the target gene in the epigenetically edited chromosome for repressed expression. In some embodiments, the histone is histone H3 and methylation is at Lysine 4, marking the target gene in the epigenetically edited chromosome for increased expression.

[0293] In some embodiments, all histone tails of histones bound to DNA nucleotides within 500 bps flanking a enhancer sequence, isolator sequence, or CTCF binding sequence of a target gene in the epigenetically edited chromosome in a cell are acetylated as compared to the original state of the chromosome or the chromosome in a comparable cell not contacted with the epigenetic editor. In some embodiments, at least 1, 2, 3, 4, 5, 6, 7, 8, 9, 10, 11, 12, 13, 14, 15, 16, 17, 18, 19, 20, 25, 30 or more histone tails of histones bound to DNAs within 500 bps flanking a enhancer sequence, isolator sequence, or CTCF binding sequence of a gene in the epigenetically edited chromosome in a cell are acetylated as compared to the original state of the chromosome or the chromosome in a comparable cell not contacted with the epigenetic editor. In some embodiments, at least 5%, 6%, 7%, 8%, 9%, 10%, 15%, 20%, 25%, 30%, 35%, 40%, 45%, 50%, 55%, 60%, 65%, 70%, 75%, 80%, 85%, 90%, 95%, 96%, 97%, 98%, or 99% of histone tails of histones bound to DNAs within 500 bps flanking a enhancer sequence, isolator sequence, or CTCF binding sequence of a gene in the epigenetically edited chromosome in a cell are acetylated as compared to the original state of the chromosome or the chromosome in a comparable cell not contacted with the epigenetic editor. In some embodiments, one single histone tail of histones bound to DNAs within 500 bps flanking a enhancer sequence, isolator sequence, or CTCF binding sequence of a gene in the epigenetically edited chromosome in a cell is acetylated as compared to the original state of the chromosome or the chromosome in a comparable cell not contacted with the epigenetic editor. In some embodiments, one single histone octamer bound to DNAs within 500 bps flanking a enhancer sequence, isolator sequence, or CTCF binding sequence of a gene in the epigenetically edited chromosome in a cell is acetylated as compared to the original state of the chromosome or the chromosome in a comparable cell not contacted with the epigenetic editor.

[0294] In some embodiments, all histone tails of histones bound to DNA nucleotides within 500 bps flanking a enhancer sequence, isolator sequence, or CTCF binding sequence of a target gene in the epigenetically edited chromosome in a cell are deacetylated as compared to the original state of the chromosome or the chromosome in a comparable cell not contacted with the epigenetic editor. In some embodiments, at least 1, 2, 3, 4, 5, 6, 7, 8, 9, 10, 11, 12, 13, 14, 15, 16, 17, 18, 19, 20, 25, 30 or more histone tails of histones bound to DNAs within 500 bps flanking a enhancer sequence, isolator sequence, or CTCF binding sequence of a gene in the epigenetically edited chromosome in a cell are deacetylated as compared to the original state of the chromosome or the chromosome in a comparable cell not contacted with the epigenetic editor. In some embodiments, at least 5%, 6%, 7%, 8%, 9%, 10%, 15%, 20%, 25%, 30%, 35%, 40%, 45%, 50%, 55%, 60%, 65%, 70%, 75%, 80%, 85%, 90%, 95%, 96%, 97%, 98%, or 99% of histone tails of histones bound to DNAs within 500 bps flanking a enhancer sequence, isolator sequence, or CTCF binding sequence of a gene in the epigenetically edited chromosome in a cell are deacetylated as compared to the original state of the chromosome or the chromosome in a comparable cell not contacted with the epigenetic editor. In some embodiments, one single histone tail of histones bound to DNAs within 500 bps flanking a enhancer sequence, isolator sequence, or CTCF binding sequence of a gene in the epigenetically edited chromosome in a cell is deacetylated as compared to the original state of the chromosome or the chromosome in a comparable cell not contacted with the epigenetic editor. In some embodiments, one single histone octamer bound to DNAs within 500 bps flanking a enhancer sequence, isolator sequence, or CTCF binding sequence of a gene in the epigenetically edited chromosome in a cell is deacetylated as compared to the original state of the chromosome or the chromosome in a comparable cell not contacted with the epigenetic editor.

[0295] In some embodiments, all CpG dinucleotides within 200 bps flanking a enhancer sequence, isolator sequence, or CTCF binding site of a gene in the epigenetically edited chromosome in a cell are demethylated as compared to the original state of the gene or the gene in a comparable cell not contacted with the epigenetic editor. In some embodiments, at least 1, 2, 3, 4, 5, 6, 7, 8, 9, 10, 11, 12, 13, 14, 15, 16, 17, 18, 19, 20, 25, 30, 35, 40, 45, 50, 60, 70, 80, 90 or more CpG dinucleotides within 200 bps flanking a enhancer sequence, isolator sequence, or CTCF binding site of a gene in the epigenetically edited chromosome in a cell are demethylated as compared to the original state of the gene or the gene in a comparable cell not contacted with the epigenetic editor. In some embodiments, at least 5%, 6%, 7%, 8%, 9%, 10%, 15%, 20%, 25%, 30%, 35%, 40%, 45%, 50%, 55%, 60%, 65%, 70%, 75%, 80%, 85%, 90%, 95%, 96%, 97%, 98%, or 99% of CpG dinucleotides within 200 bps flanking a enhancer sequence, isolator sequence, or CTCF binding site of a gene in the epigenetically edited chromosome in a cell are demethylated as compared to the original state of the gene or the gene in a comparable cell not contacted with the epigenetic editor. In some embodiments, one single CpG dinucleotide within 200 bps flanking a enhancer sequence, isolator sequence, or CTCF binding site of a gene in the epigenetically edited chromosome in a cell is demethylated as compared to the original state of the gene or the gene in a comparable cell not contacted with the epigenetic editor.

[0296] In some embodiments, all histone tails of histones bound to DNA nucleotides within 200 bps flanking a enhancer sequence, isolator sequence, or CTCF binding site of a target gene in the epigenetically edited chromosome in a cell are methylated as compared to the original state of the chromosome or the chromosome in a comparable cell not contacted with the epigenetic editor. In some embodiments, at least 1, 2, 3, 4, 5, 6, 7, 8, 9, 10, 11, 12, 13, 14, 15, 16, 17, 18, 19, 20 or more histone tails of histones bound to DNAs within 200 bps flanking a enhancer sequence, isolator sequence, or CTCF binding site of a gene in the epigenetically edited chromosome in a cell are methylated as compared to the original state of the chromosome or the chromosome in a comparable cell not contacted with the epigenetic editor. In some embodiments, at least 5%, 6%, 7%, 8%, 9%, 10%, 15%, 20%, 25%, 30%, 35%, 40%, 45%, 50%, 55%, 60%, 65%, 70%, 75%, 80%, 85%, 90%, 95%, 96%, 97%, 98%, or 99% of histone tails of histones bound to DNAs within 200 bps flanking a enhancer sequence, isolator sequence, or CTCF binding site of a gene in the epigenetically edited chromosome in a cell are methylated as compared to the original state of the chromosome or the chromosome in a comparable cell not contacted with the epigenetic editor. In some embodiments, one single histone tail of histones bound to DNAs within 200 bps flanking a enhancer sequence, isolator sequence, or CTCF binding site of a gene in the epigenetically edited chromosome in a cell is methylated as compared to the original state of the chromosome or the chromosome in a comparable cell not contacted with the epigenetic editor. In some embodiments, one single histone octamer bound to DNAs within 200 bps flanking a enhancer sequence, isolator sequence, or CTCF binding site of a gene in the epigenetically edited chromosome in a cell is methylated as compared to the original state of the chromosome or the chromosome in a comparable cell not contacted with the epigenetic editor. In some embodiments, the histone is histone H3 and methylation is at Lysine 9, marking the target gene in the epigenetically edited chromosome for repressed expression. In some embodiments, the histone is histone H3 and methylation is at Lysine 4, marking the target gene in the epigenetically edited chromosome for increased expression.

[0297] In some embodiments, all histone tails of histones bound to DNA nucleotides within 200 bps flanking a enhancer sequence, isolator sequence, or CTCF binding site of a target gene in the epigenetically edited chromosome in a cell are demethylated as compared to the original state of the chromosome or the chromosome in a comparable cell not contacted with the epigenetic editor. In some embodiments, at least 1, 2, 3, 4, 5, 6, 7, 8, 9, 10, 11, 12, 13, 14, 15, 16, 17, 18, 19, 20 or more histone tails of histones bound to DNAs within 200 bps flanking a enhancer sequence, isolator sequence, or CTCF binding site of a gene in the epigenetically edited chromosome in a cell are demethylated as compared to the original state of the chromosome or the chromosome in a comparable cell not contacted with the epigenetic editor. In some embodiments, at least 5%, 6%, 7%, 8%, 9%, 10%, 15%, 20%, 25%, 30%, 35%, 40%, 45%, 50%, 55%, 60%, 65%, 70%, 75%, 80%, 85%, 90%, 95%, 96%, 97%, 98%, or 99% of histone tails of histones bound to DNAs within 200 bps flanking a enhancer sequence, isolator sequence, or CTCF binding site of a gene in the epigenetically edited chromosome in a cell are demethylated as compared to the original state of the chromosome or the chromosome in a comparable cell not contacted with the epigenetic editor. In some embodiments, one single histone tail of histones bound to DNAs within 200 bps flanking a enhancer sequence, isolator sequence, or CTCF binding site of a gene in the epigenetically edited chromosome in a cell is demethylated as compared to the original state of the chromosome or the chromosome in a comparable cell not contacted with the epigenetic editor. In some embodiments, one single histone octamer bound to DNAs within 200 bps flanking a enhancer sequence, isolator sequence, or CTCF binding site of a gene in the epigenetically edited chromosome in a cell is demethylated as compared to the original state of the chromosome or the chromosome in a comparable cell not contacted with the epigenetic editor. In some embodiments, the histone is histone H3 and methylation is at Lysine 9, marking the target gene in the epigenetically edited chromosome for repressed expression. In some embodiments, the histone is histone H3 and methylation is at Lysine 4, marking the target gene in the epigenetically edited chromosome for increased expression.

[0298] In some embodiments, all histone tails of histones bound to DNA nucleotides within 200 bps flanking a enhancer sequence, isolator sequence, or CTCF binding site of a target gene in the epigenetically edited chromosome in a cell are acetylated as compared to the original state of the chromosome or the chromosome in a comparable cell not contacted with the epigenetic editor. In some embodiments, at least 1, 2, 3, 4, 5, 6, 7, 8, 9, 10, 11, 12, 13, 14, 15, 16, 17, 18, 19, 20 or more histone tails of histones bound to DNAs within 200 bps flanking a enhancer sequence, isolator sequence, or CTCF binding site of a gene in the epigenetically edited chromosome in a cell are acetylated as compared to the original state of the chromosome or the chromosome in a comparable cell not contacted with the epigenetic editor. In some embodiments, at least 5%, 6%, 7%, 8%, 9%, 10%, 15%, 20%, 25%, 30%, 35%, 40%, 45%, 50%, 55%, 60%, 65%, 70%, 75%, 80%, 85%, 90%, 95%, 96%, 97%, 98%, or 99% of histone tails of histones bound to DNAs within 200 bps flanking a enhancer sequence, isolator sequence, or CTCF binding site of a gene in the epigenetically edited chromosome in a cell are acetylated as compared to the original state of the chromosome or the chromosome in a comparable cell not contacted with the epigenetic editor. In some embodiments, one single histone tail of histones bound to DNAs within 200 bps flanking a enhancer sequence, isolator sequence, or CTCF binding site of a gene in the epigenetically edited chromosome in a cell is acetylated as compared to the original state of the chromosome or the chromosome in a comparable cell not contacted with the epigenetic editor. In some embodiments, one single histone octamer bound to DNAs within 200 bps flanking a enhancer sequence, isolator sequence, or CTCF binding site of a gene in the epigenetically edited chromosome in a cell is acetylated as compared to the original state of the chromosome or the chromosome in a comparable cell not contacted with the epigenetic editor.

[0299] In some embodiments, all histone tails of histones bound to DNA nucleotides within 200 bps flanking a enhancer sequence, isolator sequence, or CTCF binding site of a target gene in the epigenetically edited chromosome in a cell are deacetylated as compared to the original state of the chromosome or the chromosome in a comparable cell not contacted with the epigenetic editor. In some embodiments, at least 1, 2, 3, 4, 5, 6, 7, 8, 9, 10, 11, 12, 13, 14, 15, 16, 17, 18, 19, 20 or more histone tails of histones bound to DNAs within 200 bps flanking a enhancer sequence, isolator sequence, or CTCF binding site of a gene in the epigenetically edited chromosome in a cell are deacetylated as compared to the original state of the chromosome or the chromosome in a comparable cell not contacted with the epigenetic editor. In some embodiments, at least 5%, 6%, 7%, 8%, 9%, 10%, 15%, 20%, 25%, 30%, 35%, 40%, 45%, 50%, 55%, 60%, 65%, 70%, 75%, 80%, 85%, 90%, 95%, 96%, 97%, 98%, or 99% of histone tails of histones bound to DNAs within 200 bps flanking a enhancer sequence, isolator sequence, or CTCF binding site of a gene in the epigenetically edited chromosome in a cell are deacetylated as compared to the original state of the chromosome or the chromosome in a comparable cell not contacted with the epigenetic editor. In some embodiments, one single histone tail of histones bound to DNAs within 200 bps flanking a enhancer sequence, isolator sequence, or CTCF binding site of a gene in the epigenetically edited chromosome in a cell is deacetylated as compared to the original state of the chromosome or the chromosome in a comparable cell not contacted with the epigenetic editor. In some embodiments, one single histone octamer bound to DNAs within 200 bps flanking a enhancer sequence, isolator sequence, or CTCF binding site of a gene in the epigenetically edited chromosome in a cell is deacetylated as compared to the original state of the chromosome or the chromosome in a comparable cell not contacted with the epigenetic editor.

[0300] In some embodiments, an epigenetically modified chromosome results from contacting a chromosome with an epigenetic editor as described herein. For example, an epigenetic editor may target a target sequence in a target gene in the chromosome and alter an epigenetic modification state of one or more nucleotides or one or more histone tails in the chromosome. The epigenetic modification placed or removed by the epigenetic editor may be in close proximity to the target sequence, or may be 50, 100, 200, 300, 400, 500, 600, 700, 800, 900, 1000, 1100, 1200, 1300, 1400, 1500, 1600, 1700, 1800, 1900, 2000, 2500, 3000 or more base pairs upstream or downstream of such target sequence. in some embodiments, the epigenetic editor initiates an epigenetic modification, e.g. DNA methylation, at one or more nucleotides in close proximity to the target sequence. The initial epigenetic modification may spread to nucleotides or histones upstream or downstream of the target sequence, for example, 50, 100, 200, 300, 400, 500, 600, 700, 800, 900, 1000, 1100, 1200, 1300, 1400, 1500, 1600, 1700, 1800, 1900, 2000, 2500, 3000 or more base pairs upstream or downstream of such target sequence.

[0301] In some embodiments, all CpG dinucleotides within 2000 bps flanking a target sequence in the epigenetically edited chromosome in a cell are methylated as compared to the original state of the gene or the gene in a comparable cell not contacted with the epigenetic editor. In some embodiments, at least 1, 2, 3, 4, 5, 6, 7, 8, 9, 10, 11, 12, 13, 14, 15, 16, 17, 18, 19, 20, 25, 30, 35, 40, 45, 50, 60, 70, 80, 90, 100, 150, 200, 250, 300, 350, 400, 450, 500, 550, 600, 650, 700 or more CpG dinucleotides within 2000 bps flanking a target sequence in the epigenetically edited chromosome in a cell are methylated as compared to the original state of the gene or the gene in a comparable cell not contacted with the epigenetic editor. In some embodiments, at least 5%, 6%, 7%, 8%, 9%, 10%, 15%, 20%, 25%, 30%, 35%, 40%, 45%, 50%, 55%, 60%, 65%, 70%, 75%, 80%, 85%, 90%, 95%, 96%, 97%, 98%, or 99% of CpG dinucleotides within 2000 bps flanking a target sequence in the epigenetically edited chromosome in a cell are methylated as compared to the original state of the gene or the gene in a comparable cell not contacted with the epigenetic editor. In some embodiments, one single CpG dinucleotide within 2000 bps flanking a target sequence in the epigenetically edited chromosome in a cell is methylated as compared to the original state of the gene or the gene in a comparable cell not contacted with the epigenetic editor.

[0302] In some embodiments, all CpG dinucleotides within 2000 bps flanking a target sequence in the epigenetically edited chromosome in a cell are demethylated as compared to the original state of the gene or the gene in a comparable cell not contacted with the epigenetic editor. In some embodiments, at least 1, 2, 3, 4, 5, 6, 7, 8, 9, 10, 11, 12, 13, 14, 15, 16, 17, 18, 19, 20, 25, 30, 35, 40, 45, 50, 60, 70, 80, 90, 100, 150, 200, 250, 300, 350, 400, 450, 500, 550, 600, 650, 700 or more CpG dinucleotides within 2000 bps flanking a target sequence in the epigenetically edited chromosome in a cell are demethylated as compared to the original state of the gene or the gene in a comparable cell not contacted with the epigenetic editor. In some embodiments, at least 5%, 6%, 7%, 8%, 9%, 10%, 15%, 20%, 25%, 30%, 35%, 40%, 45%, 50%, 55%, 60%, 65%, 70%, 75%, 80%, 85%, 90%, 95%, 96%, 97%, 98%, or 99% of CpG dinucleotides within 2000 bps flanking a target sequence in the epigenetically edited chromosome in a cell are demethylated as compared to the original state of the gene or the gene in a comparable cell not contacted with the epigenetic editor. In some embodiments, one single CpG dinucleotide within 2000 bps flanking a target sequence in the epigenetically edited chromosome in a cell is demethylated as compared to the original state of the gene or the gene in a comparable cell not contacted with the epigenetic editor.

[0303] In some embodiments, all histone tails of histones bound to DNA nucleotides within 2000 bps flanking a promoter sequence of a target gene in the epigenetically edited chromosome in a cell are methylated as compared to the original state of the chromosome or the chromosome in a comparable cell not contacted with the epigenetic editor. In some embodiments, at least 1, 2, 3, 4, 5, 6, 7, 8, 9, 10, 11, 12, 13, 14, 15, 16, 17, 18, 19, 20, 25, 30, 35, 40, 45, 50, 55, 60, 65, 70, 75, 80, 85, 90, 95, 100, 105, 110, 115, 120 or more histone tails of histones bound to DNAs within 2000 bps flanking a target sequence in the epigenetically edited chromosome in a cell are methylated as compared to the original state of the chromosome or the chromosome in a comparable cell not contacted with the epigenetic editor. In some embodiments, at least 5%, 6%, 7%, 8%, 9%, 10%, 15%, 20%, 25%, 30%, 35%, 40%, 45%, 50%, 55%, 60%, 65%, 70%, 75%, 80%, 85%, 90%, 95%, 96%, 97%, 98%, or 99% of histone tails of histones bound to DNAs within 2000 bps flanking a target sequence in the epigenetically edited chromosome in a cell are methylated as compared to the original state of the chromosome or the chromosome in a comparable cell not contacted with the epigenetic editor. In some embodiments, one single histone tail of histones bound to DNAs within 2000 bps flanking a target sequence in the epigenetically edited chromosome in a cell is methylated as compared to the original state of the chromosome or the chromosome in a comparable cell not contacted with the epigenetic editor. In some embodiments, one single histone octamer bound to DNAs within 2000 bps flanking a target sequence in the epigenetically edited chromosome in a cell is methylated as compared to the original state of the chromosome or the chromosome in a comparable cell not contacted with the epigenetic editor. In some embodiments, the histone is histone H3 and methylation is at Lysine 9, marking the target gene in the epigenetically edited chromosome for repressed expression. In some embodiments, the histone is histone H3 and methylation is at Lysine 4, marking the target gene in the epigenetically edited chromosome for increased expression.

[0304] In some embodiments, all histone tails of histones bound to DNA nucleotides within 2000 bps flanking a promoter sequence of a target gene in the epigenetically edited chromosome in a cell are demethylated as compared to the original state of the chromosome or the chromosome in a comparable cell not contacted with the epigenetic editor. In some embodiments, at least 1, 2, 3, 4, 5, 6, 7, 8, 9, 10, 11, 12, 13, 14, 15, 16, 17, 18, 19, 20, 25, 30, 35, 40, 45, 50, 55, 60, 65, 70, 75, 80, 85, 90, 95, 100, 105, 110, 115, 120 or more histone tails of histones bound to DNAs within 2000 bps flanking a target sequence in the epigenetically edited chromosome in a cell are demethylated as compared to the original state of the chromosome or the chromosome in a comparable cell not contacted with the epigenetic editor. In some embodiments, at least 5%, 6%, 7%, 8%, 9%, 10%, 15%, 20%, 25%, 30%, 35%, 40%, 45%, 50%, 55%, 60%, 65%, 70%, 75%, 80%, 85%, 90%, 95%, 96%, 97%, 98%, or 99% of histone tails of histones bound to DNAs within 2000 bps flanking a target sequence in the epigenetically edited chromosome in a cell are demethylated as compared to the original state of the chromosome or the chromosome in a comparable cell not contacted with the epigenetic editor. In some embodiments, one single histone tail of histones bound to DNAs within 2000 bps flanking a target sequence in the epigenetically edited chromosome in a cell is demethylated as compared to the original state of the chromosome or the chromosome in a comparable cell not contacted with the epigenetic editor. In some embodiments, one single histone octamer bound to DNAs within 2000 bps flanking a target sequence in the epigenetically edited chromosome in a cell is demethylated as compared to the original state of the chromosome or the chromosome in a comparable cell not contacted with the epigenetic editor. In some embodiments, the histone is histone H3 and methylation is at Lysine 9, marking the target gene in the epigenetically edited chromosome for repressed expression. In some embodiments, the histone is histone H3 and methylation is at Lysine 4, marking the target gene in the epigenetically edited chromosome for increased expression.

[0305] In some embodiments, all histone tails of histones bound to DNA nucleotides within 2000 bps flanking a promoter sequence of a target gene in the epigenetically edited chromosome in a cell are acetylated as compared to the original state of the chromosome or the chromosome in a comparable cell not contacted with the epigenetic editor. In some embodiments, at least 1, 2, 3, 4, 5, 6, 7, 8, 9, 10, 11, 12, 13, 14, 15, 16, 17, 18, 19, 20, 25, 30, 35, 40, 45, 50, 55, 60, 65, 70, 75, 80, 85, 90, 95, 100, 105, 110, 115, 120 or more histone tails of histones bound to DNAs within 2000 bps flanking a target sequence in the epigenetically edited chromosome in a cell are acetylated as compared to the original state of the chromosome or the chromosome in a comparable cell not contacted with the epigenetic editor. In some embodiments, at least 5%, 6%, 7%, 8%, 9%, 10%, 15%, 20%, 25%, 30%, 35%, 40%, 45%, 50%, 55%, 60%, 65%, 70%, 75%, 80%, 85%, 90%, 95%, 96%, 97%, 98%, or 99% of histone tails of histones bound to DNAs within 2000 bps flanking a target sequence in the epigenetically edited chromosome in a cell are acetylated as compared to the original state of the chromosome or the chromosome in a comparable cell not contacted with the epigenetic editor. In some embodiments, one single histone tail of histones bound to DNAs within 2000 bps flanking a target sequence in the epigenetically edited chromosome in a cell is acetylated as compared to the original state of the chromosome or the chromosome in a comparable cell not contacted with the epigenetic editor. In some embodiments, one single histone octamer bound to DNAs within 2000 bps flanking a target sequence in the epigenetically edited chromosome in a cell is acetylated as compared to the original state of the chromosome or the chromosome in a comparable cell not contacted with the epigenetic editor.

[0306] In some embodiments, all histone tails of histones bound to DNA nucleotides within 2000 bps flanking a promoter sequence of a target gene in the epigenetically edited chromosome in a cell are deacetylated as compared to the original state of the chromosome or the chromosome in a comparable cell not contacted with the epigenetic editor. In some embodiments, at least 1, 2, 3, 4, 5, 6, 7, 8, 9, 10, 11, 12, 13, 14, 15, 16, 17, 18, 19, 20, 25, 30, 35, 40, 45, 50, 55, 60, 65, 70, 75, 80, 85, 90, 95, 100, 105, 110, 115, 120 or more histone tails of histones bound to DNAs within 2000 bps flanking a target sequence in the epigenetically edited chromosome in a cell are deacetylated as compared to the original state of the chromosome or the chromosome in a comparable cell not contacted with the epigenetic editor. In some embodiments, at least 5%, 6%, 7%, 8%, 9%, 10%, 15%, 20%, 25%, 30%, 35%, 40%, 45%, 50%, 55%, 60%, 65%, 70%, 75%, 80%, 85%, 90%, 95%, 96%, 97%, 98%, or 99% of histone tails of histones bound to DNAs within 2000 bps flanking a target sequence in the epigenetically edited chromosome in a cell are deacetylated as compared to the original state of the chromosome or the chromosome in a comparable cell not contacted with the epigenetic editor. In some embodiments, one single histone tail of histones bound to DNAs within 2000 bps flanking a target sequence in the epigenetically edited chromosome in a cell is deacetylated as compared to the original state of the chromosome or the chromosome in a comparable cell not contacted with the epigenetic editor. In some embodiments, one single histone octamer bound to DNAs within 2000 bps flanking a target sequence in the epigenetically edited chromosome in a cell is deacetylated as compared to the original state of the chromosome or the chromosome in a comparable cell not contacted with the epigenetic editor.

[0307] In some embodiments, all CpG dinucleotides within 1500 bp flanking a target sequence in the epigenetically edited chromosome in a cell are methylated as compared to the original state of the gene or the gene in a comparable cell not contacted with the epigenetic editor. In some embodiments, at least 1, 2, 3, 4, 5, 6, 7, 8, 9, 10, 11, 12, 13, 14, 15, 16, 17, 18, 19, 20, 25, 30, 35, 40, 45, 50, 60, 70, 80, 90, 100, 150, 200, 250, 300, 350, 400, 450, 550, 500, 600, 650, 700 or more CpG dinucleotides within 1500 bps flanking a target sequence in the epigenetically edited chromosome in a cell are methylated as compared to the original state of the gene or the gene in a comparable cell not contacted with the epigenetic editor. In some embodiments, at least 5%, 6%, 7%, 8%, 9%, 10%, 15%, 20%, 25%, 30%, 35%, 40%, 45%, 50%, 55%, 60%, 65%, 70%, 75%, 80%, 85%, 90%, 95%, 96%, 97%, 98%, or 99% of CpG dinucleotides within 1500 bps flanking a target sequence in the epigenetically edited chromosome in a cell are methylated as compared to the original state of the gene or the gene in a comparable cell not contacted with the epigenetic editor. In some embodiments, one single CpG dinucleotide within 1500 bps flanking a target sequence in the epigenetically edited chromosome in a cell is methylated as compared to the original state of the gene or the gene in a comparable cell not contacted with the epigenetic editor.

[0308] In some embodiments, all CpG dinucleotides within 1500 bps flanking a target sequence in the epigenetically edited chromosome in a cell are demethylated as compared to the original state of the gene or the gene in a comparable cell not contacted with the epigenetic editor. In some embodiments, at least 1, 2, 3, 4, 5, 6, 7, 8, 9, 10, 11, 12, 13, 14, 15, 16, 17, 18, 19, 20, 25, 30, 35, 40, 45, 50, 60, 70, 80, 90, 100, 150, 200, 250, 300, 350, 400, 450, 500, 550, 600, 650, 700 or more CpG dinucleotides within 1500 bps flanking a target sequence in the epigenetically edited chromosome in a cell are demethylated as compared to the original state of the gene or the gene in a comparable cell not contacted with the epigenetic editor. In some embodiments, at least 5%, 6%, 7%, 8%, 9%, 10%, 15%, 20%, 25%, 30%, 35%, 40%, 45%, 50%, 55%, 60%, 65%, 70%, 75%, 80%, 85%, 90%, 95%, 96%, 97%, 98%, or 99% of CpG dinucleotides within 1500 bps flanking a target sequence in the epigenetically edited chromosome in a cell are demethylated as compared to the original state of the gene or the gene in a comparable cell not contacted with the epigenetic editor. In some embodiments, one single CpG dinucleotide within 1500 bps flanking a target sequence in the epigenetically edited chromosome in a cell is demethylated as compared to the original state of the gene or the gene in a comparable cell not contacted with the epigenetic editor.

[0309] In some embodiments, all histone tails of histones bound to DNA nucleotides within 1500 bps flanking a promoter sequence of a target gene in the epigenetically edited chromosome in a cell are methylated as compared to the original state of the chromosome or the chromosome in a comparable cell not contacted with the epigenetic editor. In some embodiments, at least 1, 2, 3, 4, 5, 6, 7, 8, 9, 10, 11, 12, 13, 14, 15, 16, 17, 18, 19, 20, 25, 30, 35, 40, 45, 50, 55, 60, 65, 70, 75, 80, 85, 90 or more histone tails of histones bound to DNAs within 1500 bps flanking a target sequence in the epigenetically edited chromosome in a cell are methylated as compared to the original state of the chromosome or the chromosome in a comparable cell not contacted with the epigenetic editor. In some embodiments, at least 5%, 6%, 7%, 8%, 9%, 10%, 15%, 20%, 25%, 30%, 35%, 40%, 45%, 50%, 55%, 60%, 65%, 70%, 75%, 80%, 85%, 90%, 95%, 96%, 97%, 98%, or 99% of histone tails of histones bound to DNAs within 1500 bps flanking a target sequence in the epigenetically edited chromosome in a cell are methylated as compared to the original state of the chromosome or the chromosome in a comparable cell not contacted with the epigenetic editor. In some embodiments, one single histone tail of histones bound to DNAs within 1500 bps flanking a target sequence in the epigenetically edited chromosome in a cell is methylated as compared to the original state of the chromosome or the chromosome in a comparable cell not contacted with the epigenetic editor. In some embodiments, one single histone octamer bound to DNAs within 1500 bps flanking a target sequence in the epigenetically edited chromosome in a cell is methylated as compared to the original state of the chromosome or the chromosome in a comparable cell not contacted with the epigenetic editor. In some embodiments, the histone is histone H3 and methylation is at Lysine 9, marking the target gene in the epigenetically edited chromosome for repressed expression. In some embodiments, the histone is histone H3 and methylation is at Lysine 4, marking the target gene in the epigenetically edited chromosome for increased expression.

[0310] In some embodiments, all histone tails of histones bound to DNA nucleotides within 1500 bps flanking a promoter sequence of a target gene in the epigenetically edited chromosome in a cell are demethylated as compared to the original state of the chromosome or the chromosome in a comparable cell not contacted with the epigenetic editor. In some embodiments, at least 1, 2, 3, 4, 5, 6, 7, 8, 9, 10, 11, 12, 13, 14, 15, 16, 17, 18, 19, 20, 25, 30, 35, 40, 45, 50, 55, 60, 65, 70, 75, 80, 85, 90 or more histone tails of histones bound to DNAs within 1500 bps flanking a target sequence in the epigenetically edited chromosome in a cell are demethylated as compared to the original state of the chromosome or the chromosome in a comparable cell not contacted with the epigenetic editor. In some embodiments, at least 5%, 6%, 7%, 8%, 9%, 10%, 15%, 20%, 25%, 30%, 35%, 40%, 45%, 50%, 55%, 60%, 65%, 70%, 75%, 80%, 85%, 90%, 95%, 96%, 97%, 98%, or 99% of histone tails of histones bound to DNAs within 1500 bps flanking a target sequence in the epigenetically edited chromosome in a cell are demethylated as compared to the original state of the chromosome or the chromosome in a comparable cell not contacted with the epigenetic editor. In some embodiments, one single histone tail of histones bound to DNAs within 1500 bps flanking a target sequence in the epigenetically edited chromosome in a cell is demethylated as compared to the original state of the chromosome or the chromosome in a comparable cell not contacted with the epigenetic editor. In some embodiments, one single histone octamer bound to DNAs within 1500 bps flanking a target sequence in the epigenetically edited chromosome in a cell is demethylated as compared to the original state of the chromosome or the chromosome in a comparable cell not contacted with the epigenetic editor. In some embodiments, the histone is histone H3 and methylation is at Lysine 9, marking the target gene in the epigenetically edited chromosome for repressed expression. In some embodiments, the histone is histone H3 and methylation is at Lysine 4, marking the target gene in the epigenetically edited chromosome for increased expression.

[0311] In some embodiments, all histone tails of histones bound to DNA nucleotides within 1500 bps flanking a promoter sequence of a target gene in the epigenetically edited chromosome in a cell are acetylated as compared to the original state of the chromosome or the chromosome in a comparable cell not contacted with the epigenetic editor. In some embodiments, at least 1, 2, 3, 4, 5, 6, 7, 8, 9, 10, 11, 12, 13, 14, 15, 16, 17, 18, 19, 20, 25, 30, 35, 40, 45, 50, 55, 60, 65, 70, 75, 80, 85, 90 or more histone tails of histones bound to DNAs within 1500 bps flanking a target sequence in the epigenetically edited chromosome in a cell are acetylated as compared to the original state of the chromosome or the chromosome in a comparable cell not contacted with the epigenetic editor. In some embodiments, at least 5%, 6%, 7%, 8%, 9%, 10%, 15%, 20%, 25%, 30%, 35%, 40%, 45%, 50%, 55%, 60%, 65%, 70%, 75%, 80%, 85%, 90%, 95%, 96%, 97%, 98%, or 99% of histone tails of histones bound to DNAs within 1500 bps flanking a target sequence in the epigenetically edited chromosome in a cell are acetylated as compared to the original state of the chromosome or the chromosome in a comparable cell not contacted with the epigenetic editor. In some embodiments, one single histone tail of histones bound to DNAs within 1500 bps flanking a target sequence in the epigenetically edited chromosome in a cell is acetylated as compared to the original state of the chromosome or the chromosome in a comparable cell not contacted with the epigenetic editor. In some embodiments, one single histone octamer bound to DNAs within 1500 bps flanking a target sequence in the epigenetically edited chromosome in a cell is acetylated as compared to the original state of the chromosome or the chromosome in a comparable cell not contacted with the epigenetic editor.

[0312] In some embodiments, all histone tails of histones bound to DNA nucleotides within 1500 bps flanking a promoter sequence of a target gene in the epigenetically edited chromosome in a cell are deacetylated as compared to the original state of the chromosome or the chromosome in a comparable cell not contacted with the epigenetic editor. In some embodiments, at least 1, 2, 3, 4, 5, 6, 7, 8, 9, 10, 11, 12, 13, 14, 15, 16, 17, 18, 19, 20, 25, 30, 35, 40, 45, 50, 55, 60, 65, 70, 75, 80, 85, 90 or more histone tails of histones bound to DNAs within 1500 bps flanking a target sequence in the epigenetically edited chromosome in a cell are deacetylated as compared to the original state of the chromosome or the chromosome in a comparable cell not contacted with the epigenetic editor. In some embodiments, at least 5%, 6%, 7%, 8%, 9%, 10%, 15%, 20%, 25%, 30%, 35%, 40%, 45%, 50%, 55%, 60%, 65%, 70%, 75%, 80%, 85%, 90%, 95%, 96%, 97%, 98%, or 99% of histone tails of histones bound to DNAs within 1500 bps flanking a target sequence in the epigenetically edited chromosome in a cell are deacetylated as compared to the original state of the chromosome or the chromosome in a comparable cell not contacted with the epigenetic editor. In some embodiments, one single histone tail of histones bound to DNAs within 1500 bps flanking a target sequence in the epigenetically edited chromosome in a cell is deacetylated as compared to the original state of the chromosome or the chromosome in a comparable cell not contacted with the epigenetic editor. In some embodiments, one single histone octamer bound to DNAs within 1500 bps flanking a target sequence in the epigenetically edited chromosome in a cell is deacetylated as compared to the original state of the chromosome or the chromosome in a comparable cell not contacted with the epigenetic editor.

[0313] In some embodiments, all CpG dinucleotides within 1000 bps flanking a target sequence in the epigenetically edited chromosome in a cell are methylated as compared to the original state of the gene or the gene in a comparable cell not contacted with the epigenetic editor. In some embodiments, at least 1, 2, 3, 4, 5, 6, 7, 8, 9, 10, 11, 12, 13, 14, 15, 16, 17, 18, 19, 20, 25, 30, 35, 40, 45, 50, 60, 70, 80, 90, 100, 150, 200, 250, 300, 350, 400, 450, 500 or more CpG dinucleotides within 1000 bps flanking a target sequence in the epigenetically edited chromosome in a cell are methylated as compared to the original state of the gene or the gene in a comparable cell not contacted with the epigenetic editor. In some embodiments, at least 5%, 6%, 7%, 8%, 9%, 10%, 15%, 20%, 25%, 30%, 35%, 40%, 45%, 50%, 55%, 60%, 65%, 70%, 75%, 80%, 85%, 90%, 95%, 96%, 97%, 98%, or 99% of CpG dinucleotides within 1000 bps flanking a target sequence in the epigenetically edited chromosome in a cell are methylated as compared to the original state of the gene or the gene in a comparable cell not contacted with the epigenetic editor. In some embodiments, one single CpG dinucleotide within 1000 bps flanking a target sequence in the epigenetically edited chromosome in a cell is methylated as compared to the original state of the gene or the gene in a comparable cell not contacted with the epigenetic editor.

[0314] In some embodiments, all CpG dinucleotides within 1000 bps flanking a target sequence in the epigenetically edited chromosome in a cell are demethylated as compared to the original state of the gene or the gene in a comparable cell not contacted with the epigenetic editor. In some embodiments, at least 1, 2, 3, 4, 5, 6, 7, 8, 9, 10, 11, 12, 13, 14, 15, 16, 17, 18, 19, 20, 25, 30, 35, 40, 45, 50, 60, 70, 80, 90, 100, 150, 200, 250, 300, 350, 400, 450, 500 or more CpG dinucleotides within 1000 bps flanking a target sequence in the epigenetically edited chromosome in a cell are demethylated as compared to the original state of the gene or the gene in a comparable cell not contacted with the epigenetic editor. In some embodiments, at least 5%, 6%, 7%, 8%, 9%, 10%, 15%, 20%, 25%, 30%, 35%, 40%, 45%, 50%, 55%, 60%, 65%, 70%, 75%, 80%, 85%, 90%, 95%, 96%, 97%, 98%, or 99% of CpG dinucleotides within 1000 bps flanking a target sequence in the epigenetically edited chromosome in a cell are demethylated as compared to the original state of the gene or the gene in a comparable cell not contacted with the epigenetic editor. In some embodiments, one single CpG dinucleotide within 1000 bps flanking a target sequence in the epigenetically edited chromosome in a cell is demethylated as compared to the original state of the gene or the gene in a comparable cell not contacted with the epigenetic editor.

[0315] In some embodiments, all histone tails of histones bound to DNA nucleotides within 1000 bps flanking a promoter sequence of a target gene in the epigenetically edited chromosome in a cell are methylated as compared to the original state of the chromosome or the chromosome in a comparable cell not contacted with the epigenetic editor. In some embodiments, at least 1, 2, 3, 4, 5, 6, 7, 8, 9, 10, 11, 12, 13, 14, 15, 16, 17, 18, 19, 20, 25, 30, 35, 40, 45, 50, 55, 60 or more histone tails of histones bound to DNAs within 1000 bps flanking a target sequence in the epigenetically edited chromosome in a cell are methylated as compared to the original state of the chromosome or the chromosome in a comparable cell not contacted with the epigenetic editor. In some embodiments, at least 5%, 6%, 7%, 8%, 9%, 10%, 15%, 20%, 25%, 30%, 35%, 40%, 45%, 50%, 55%, 60%, 65%, 70%, 75%, 80%, 85%, 90%, 95%, 96%, 97%, 98%, or 99% of histone tails of histones bound to DNAs within 1000 bps flanking a target sequence in the epigenetically edited chromosome in a cell are methylated as compared to the original state of the chromosome or the chromosome in a comparable cell not contacted with the epigenetic editor. In some embodiments, one single histone tail of histones bound to DNAs within 1000 bps flanking a target sequence in the epigenetically edited chromosome in a cell is methylated as compared to the original state of the chromosome or the chromosome in a comparable cell not contacted with the epigenetic editor. In some embodiments, one single histone octamer bound to DNAs within 1000 bps flanking a target sequence in the epigenetically edited chromosome in a cell is methylated as compared to the original state of the chromosome or the chromosome in a comparable cell not contacted with the epigenetic editor. In some embodiments, the histone is histone H3 and methylation is at Lysine 9, marking the target gene in the epigenetically edited chromosome for repressed expression. In some embodiments, the histone is histone H3 and methylation is at Lysine 4, marking the target gene in the epigenetically edited chromosome for increased expression.

[0316] In some embodiments, all histone tails of histones bound to DNA nucleotides within 1000 bps flanking a promoter sequence of a target gene in the epigenetically edited chromosome in a cell are demethylated as compared to the original state of the chromosome or the chromosome in a comparable cell not contacted with the epigenetic editor. In some embodiments, at least 1, 2, 3, 4, 5, 6, 7, 8, 9, 10, 11, 12, 13, 14, 15, 16, 17, 18, 19, 20, 25, 30, 35, 40, 45, 50, 55, 60 or more histone tails of histones bound to DNAs within 1000 bps flanking a target sequence in the epigenetically edited chromosome in a cell are demethylated as compared to the original state of the chromosome or the chromosome in a comparable cell not contacted with the epigenetic editor. In some embodiments, at least 5%, 6%, 7%, 8%, 9%, 10%, 15%, 20%, 25%, 30%, 35%, 40%, 45%, 50%, 55%, 60%, 65%, 70%, 75%, 80%, 85%, 90%, 95%, 96%, 97%, 98%, or 99% of histone tails of histones bound to DNAs within 1000 bps flanking a target sequence in the epigenetically edited chromosome in a cell are demethylated as compared to the original state of the chromosome or the chromosome in a comparable cell not contacted with the epigenetic editor. In some embodiments, one single histone tail of histones bound to DNAs within 1000 bps flanking a target sequence in the epigenetically edited chromosome in a cell is demethylated as compared to the original state of the chromosome or the chromosome in a comparable cell not contacted with the epigenetic editor. In some embodiments, one single histone octamer bound to DNAs within 1000 bps flanking a target sequence in the epigenetically edited chromosome in a cell is demethylated as compared to the original state of the chromosome or the chromosome in a comparable cell not contacted with the epigenetic editor. In some embodiments, the histone is histone H3 and methylation is at Lysine 9, marking the target gene in the epigenetically edited chromosome for repressed expression. In some embodiments, the histone is histone H3 and methylation is at Lysine 4, marking the target gene in the epigenetically edited chromosome for increased expression.

[0317] In some embodiments, all histone tails of histones bound to DNA nucleotides within 1000 bps flanking a promoter sequence of a target gene in the epigenetically edited chromosome in a cell are acetylated as compared to the original state of the chromosome or the chromosome in a comparable cell not contacted with the epigenetic editor. In some embodiments, at least 1, 2, 3, 4, 5, 6, 7, 8, 9, 10, 11, 12, 13, 14, 15, 16, 17, 18, 19, 20, 25, 30, 35, 40, 45, 50, 55, 60 or more histone tails of histones bound to DNAs within 1000 bps flanking a target sequence in the epigenetically edited chromosome in a cell are acetylated as compared to the original state of the chromosome or the chromosome in a comparable cell not contacted with the epigenetic editor. In some embodiments, at least 5%, 6%, 7%, 8%, 9%, 10%, 15%, 20%, 25%, 30%, 35%, 40%, 45%, 50%, 55%, 60%, 65%, 70%, 75%, 80%, 85%, 90%, 95%, 96%, 97%, 98%, or 99% of histone tails of histones bound to DNAs within 1000 bps flanking a target sequence in the epigenetically edited chromosome in a cell are acetylated as compared to the original state of the chromosome or the chromosome in a comparable cell not contacted with the epigenetic editor. In some embodiments, one single histone tail of histones bound to DNAs within 1000 bps flanking a target sequence in the epigenetically edited chromosome in a cell is acetylated as compared to the original state of the chromosome or the chromosome in a comparable cell not contacted with the epigenetic editor. In some embodiments, one single histone octamer bound to DNAs within 1000 bps flanking a target sequence in the epigenetically edited chromosome in a cell is acetylated as compared to the original state of the chromosome or the chromosome in a comparable cell not contacted with the epigenetic editor.

[0318] In some embodiments, all histone tails of histones bound to DNA nucleotides within 1000 bps flanking a promoter sequence of a target gene in the epigenetically edited chromosome in a cell are deacetylated as compared to the original state of the chromosome or the chromosome in a comparable cell not contacted with the epigenetic editor. In some embodiments, at least 1, 2, 3, 4, 5, 6, 7, 8, 9, 10, 11, 12, 13, 14, 15, 16, 17, 18, 19, 20, 25, 30, 35, 40, 45, 50, 55, 60 or more histone tails of histones bound to DNAs within 1000 bps flanking a target sequence in the epigenetically edited chromosome in a cell are deacetylated as compared to the original state of the chromosome or the chromosome in a comparable cell not contacted with the epigenetic editor. In some embodiments, at least 5%, 6%, 7%, 8%, 9%, 10%, 15%, 20%, 25%, 30%, 35%, 40%, 45%, 50%, 55%, 60%, 65%, 70%, 75%, 80%, 85%, 90%, 95%, 96%, 97%, 98%, or 99% of histone tails of histones bound to DNAs within 1000 bps flanking a target sequence in the epigenetically edited chromosome in a cell are deacetylated as compared to the original state of the chromosome or the chromosome in a comparable cell not contacted with the epigenetic editor. In some embodiments, one single histone tail of histones bound to DNAs within 1000 bps flanking a target sequence in the epigenetically edited chromosome in a cell is deacetylated as compared to the original state of the chromosome or the chromosome in a comparable cell not contacted with the epigenetic editor. In some embodiments, one single histone octamer bound to DNAs within 1000 bps flanking a target sequence in the epigenetically edited chromosome in a cell is deacetylated as compared to the original state of the chromosome or the chromosome in a comparable cell not contacted with the epigenetic editor.

[0319] In some embodiments, all CpG dinucleotides within 500 bps flanking a promoter sequence of a gene in the epigenetically edited chromosome in a cell are methylated as compared to the original state of the gene or the gene in a comparable cell not contacted with the epigenetic editor. In some embodiments, at least 1, 2, 3, 4, 5, 6, 7, 8, 9, 10, 11, 12, 13, 14, 15, 16, 17, 18, 19, 20, 25, 30, 35, 40, 45, 50, 60, 70, 80, 90, 100, 150, 200 or more CpG dinucleotides within 500 bps flanking a target sequence in the epigenetically edited chromosome in a cell are methylated as compared to the original state of the gene or the gene in a comparable cell not contacted with the epigenetic editor. In some embodiments, at least 5%, 6%, 7%, 8%, 9%, 10%, 15%, 20%, 25%, 30%, 35%, 40%, 45%, 50%, 55%, 60%, 65%, 70%, 75%, 80%, 85%, 90%, 95%, 96%, 97%, 98%, or 99% of CpG dinucleotides within 500 bps flanking a target sequence in the epigenetically edited chromosome in a cell are methylated as compared to the original state of the gene or the gene in a comparable cell not contacted with the epigenetic editor. In some embodiments, one single CpG dinucleotide within 500 bps flanking a target sequence in the epigenetically edited chromosome in a cell is methylated as compared to the original state of the gene or the gene in a comparable cell not contacted with the epigenetic editor.

[0320] In some embodiments, all CpG dinucleotides within 500 bps flanking a target sequence in the epigenetically edited chromosome in a cell are demethylated as compared to the original state of the gene or the gene in a comparable cell not contacted with the epigenetic editor. In some embodiments, at least 1, 2, 3, 4, 5, 6, 7, 8, 9, 10, 11, 12, 13, 14, 15, 16, 17, 18, 19, 20, 25, 30, 35, 40, 45, 50, 60, 70, 80, 90, 100, 150, 200 or more CpG dinucleotides within 500 bps flanking a target sequence in the epigenetically edited chromosome in a cell are demethylated as compared to the original state of the gene or the gene in a comparable cell not contacted with the epigenetic editor. In some embodiments, at least 5%, 6%, 7%, 8%, 9%, 10%, 15%, 20%, 25%, 30%, 35%, 40%, 45%, 50%, 55%, 60%, 65%, 70%, 75%, 80%, 85%, 90%, 95%, 96%, 97%, 98%, or 99% of CpG dinucleotides within 500 bps flanking a target sequence in the epigenetically edited chromosome in a cell are demethylated as compared to the original state of the gene or the gene in a comparable cell not contacted with the epigenetic editor. In some embodiments, one single CpG dinucleotide within 500 bps flanking a target sequence in the epigenetically edited chromosome in a cell is demethylated as compared to the original state of the gene or the gene in a comparable cell not contacted with the epigenetic editor.

[0321] In some embodiments, all histone tails of histones bound to DNA nucleotides within 500 bps flanking a promoter sequence of a target gene in the epigenetically edited chromosome in a cell are methylated as compared to the original state of the chromosome or the chromosome in a comparable cell not contacted with the epigenetic editor. In some embodiments, at least 1, 2, 3, 4, 5, 6, 7, 8, 9, 10, 11, 12, 13, 14, 15, 16, 17, 18, 19, 20, 25, 30 or more histone tails of histones bound to DNAs within 500 bps flanking a target sequence in the epigenetically edited chromosome in a cell are methylated as compared to the original state of the chromosome or the chromosome in a comparable cell not contacted with the epigenetic editor. In some embodiments, at least 5%, 6%, 7%, 8%, 9%, 10%, 15%, 20%, 25%, 30%, 35%, 40%, 45%, 50%, 55%, 60%, 65%, 70%, 75%, 80%, 85%, 90%, 95%, 96%, 97%, 98%, or 99% of histone tails of histones bound to DNAs within 500 bps flanking a target sequence in the epigenetically edited chromosome in a cell are methylated as compared to the original state of the chromosome or the chromosome in a comparable cell not contacted with the epigenetic editor. In some embodiments, one single histone tail of histones bound to DNAs within 500 bps flanking a target sequence in the epigenetically edited chromosome in a cell is methylated as compared to the original state of the chromosome or the chromosome in a comparable cell not contacted with the epigenetic editor. In some embodiments, one single histone octamer bound to DNAs within 500 bps flanking a target sequence in the epigenetically edited chromosome in a cell is methylated as compared to the original state of the chromosome or the chromosome in a comparable cell not contacted with the epigenetic editor. In some embodiments, the histone is histone H3 and methylation is at Lysine 9, marking the target gene in the epigenetically edited chromosome for repressed expression. In some embodiments, the histone is histone H3 and methylation is at Lysine 4, marking the target gene in the epigenetically edited chromosome for increased expression.

[0322] In some embodiments, all histone tails of histones bound to DNA nucleotides within 500 bps flanking a promoter sequence of a target gene in the epigenetically edited chromosome in a cell are demethylated as compared to the original state of the chromosome or the chromosome in a comparable cell not contacted with the epigenetic editor. In some embodiments, at least 1, 2, 3, 4, 5, 6, 7, 8, 9, 10, 11, 12, 13, 14, 15, 16, 17, 18, 19, 20, 25, 30 or more histone tails of histones bound to DNAs within 500 bps flanking a target sequence in the epigenetically edited chromosome in a cell are demethylated as compared to the original state of the chromosome or the chromosome in a comparable cell not contacted with the epigenetic editor. In some embodiments, at least 5%, 6%, 7%, 8%, 9%, 10%, 15%, 20%, 25%, 30%, 35%, 40%, 45%, 50%, 55%, 60%, 65%, 70%, 75%, 80%, 85%, 90%, 95%, 96%, 97%, 98%, or 99% of histone tails of histones bound to DNAs within 500 bps flanking a target sequence in the epigenetically edited chromosome in a cell are demethylated as compared to the original state of the chromosome or the chromosome in a comparable cell not contacted with the epigenetic editor. In some embodiments, one single histone tail of histones bound to DNAs within 500 bps flanking a target sequence in the epigenetically edited chromosome in a cell is demethylated as compared to the original state of the chromosome or the chromosome in a comparable cell not contacted with the epigenetic editor. In some embodiments, one single histone octamer bound to DNAs within 500 bps flanking a target sequence in the epigenetically edited chromosome in a cell is demethylated as compared to the original state of the chromosome or the chromosome in a comparable cell not contacted with the epigenetic editor. In some embodiments, the histone is histone H3 and methylation is at Lysine 9, marking the target gene in the epigenetically edited chromosome for repressed expression. In some embodiments, the histone is histone H3 and methylation is at Lysine 4, marking the target gene in the epigenetically edited chromosome for increased expression.

[0323] In some embodiments, all histone tails of histones bound to DNA nucleotides within 500 bps flanking a promoter sequence of a target gene in the epigenetically edited chromosome in a cell are acetylated as compared to the original state of the chromosome or the chromosome in a comparable cell not contacted with the epigenetic editor. In some embodiments, at least 1, 2, 3, 4, 5, 6, 7, 8, 9, 10, 11, 12, 13, 14, 15, 16, 17, 18, 19, 20, 25, 30 or more histone tails of histones bound to DNAs within 500 bps flanking a target sequence in the epigenetically edited chromosome in a cell are acetylated as compared to the original state of the chromosome or the chromosome in a comparable cell not contacted with the epigenetic editor. In some embodiments, at least 5%, 6%, 7%, 8%, 9%, 10%, 15%, 20%, 25%, 30%, 35%, 40%, 45%, 50%, 55%, 60%, 65%, 70%, 75%, 80%, 85%, 90%, 95%, 96%, 97%, 98%, or 99% of histone tails of histones bound to DNAs within 500 bps flanking a target sequence in the epigenetically edited chromosome in a cell are acetylated as compared to the original state of the chromosome or the chromosome in a comparable cell not contacted with the epigenetic editor. In some embodiments, one single histone tail of histones bound to DNAs within 500 bps flanking a target sequence in the epigenetically edited chromosome in a cell is acetylated as compared to the original state of the chromosome or the chromosome in a comparable cell not contacted with the epigenetic editor. In some embodiments, one single histone octamer bound to DNAs within 500 bps flanking a target sequence in the epigenetically edited chromosome in a cell is acetylated as compared to the original state of the chromosome or the chromosome in a comparable cell not contacted with the epigenetic editor.

[0324] In some embodiments, all histone tails of histones bound to DNA nucleotides within 500 bps flanking a promoter sequence of a target gene in the epigenetically edited chromosome in a cell are deacetylated as compared to the original state of the chromosome or the chromosome in a comparable cell not contacted with the epigenetic editor. In some embodiments, at least 1, 2, 3, 4, 5, 6, 7, 8, 9, 10, 11, 12, 13, 14, 15, 16, 17, 18, 19, 20, 25, 30 or more histone tails of histones bound to DNAs within 500 bps flanking a target sequence in the epigenetically edited chromosome in a cell are deacetylated as compared to the original state of the chromosome or the chromosome in a comparable cell not contacted with the epigenetic editor. In some embodiments, at least 5%, 6%, 7%, 8%, 9%, 10%, 15%, 20%, 25%, 30%, 35%, 40%, 45%, 50%, 55%, 60%, 65%, 70%, 75%, 80%, 85%, 90%, 95%, 96%, 97%, 98%, or 99% of histone tails of histones bound to DNAs within 500 bps flanking a target sequence in the epigenetically edited chromosome in a cell are deacetylated as compared to the original state of the chromosome or the chromosome in a comparable cell not contacted with the epigenetic editor. In some embodiments, one single histone tail of histones bound to DNAs within 500 bps flanking a target sequence in the epigenetically edited chromosome in a cell is deacetylated as compared to the original state of the chromosome or the chromosome in a comparable cell not contacted with the epigenetic editor. In some embodiments, one single histone octamer bound to DNAs within 500 bps flanking a target sequence in the epigenetically edited chromosome in a cell is deacetylated as compared to the original state of the chromosome or the chromosome in a comparable cell not contacted with the epigenetic editor.

[0325] In some embodiments, all CpG dinucleotides within 200 bps flanking a target sequence in the epigenetically edited chromosome in a cell are demethylated as compared to the original state of the gene or the gene in a comparable cell not contacted with the epigenetic editor. In some embodiments, at least 1, 2, 3, 4, 5, 6, 7, 8, 9, 10, 11, 12, 13, 14, 15, 16, 17, 18, 19, 20, 25, 30, 35, 40, 45, 50, 60, 70, 80, 90 or more CpG dinucleotides within 200 bps flanking a target sequence in the epigenetically edited chromosome in a cell are demethylated as compared to the original state of the gene or the gene in a comparable cell not contacted with the epigenetic editor. In some embodiments, at least 5%, 6%, 7%, 8%, 9%, 10%, 15%, 20%, 25%, 30%, 35%, 40%, 45%, 50%, 55%, 60%, 65%, 70%, 75%, 80%, 85%, 90%, 95%, 96%, 97%, 98%, or 99% of CpG dinucleotides within 200 bps flanking a target sequence in the epigenetically edited chromosome in a cell are demethylated as compared to the original state of the gene or the gene in a comparable cell not contacted with the epigenetic editor. In some embodiments, one single CpG dinucleotide within 200 bps flanking a target sequence in the epigenetically edited chromosome in a cell is demethylated as compared to the original state of the gene or the gene in a comparable cell not contacted with the epigenetic editor.

[0326] In some embodiments, all histone tails of histones bound to DNA nucleotides within 200 bps flanking a promoter sequence of a target gene in the epigenetically edited chromosome in a cell are methylated as compared to the original state of the chromosome or the chromosome in a comparable cell not contacted with the epigenetic editor. In some embodiments, at least 1, 2, 3, 4, 5, 6, 7, 8, 9, 10, 11, 12, 13, 14, 15, 16, 17, 18, 19, 20 or more histone tails of histones bound to DNAs within 200 bps flanking a target sequence in the epigenetically edited chromosome in a cell are methylated as compared to the original state of the chromosome or the chromosome in a comparable cell not contacted with the epigenetic editor. In some embodiments, at least 5%, 6%, 7%, 8%, 9%, 10%, 15%, 20%, 25%, 30%, 35%, 40%, 45%, 50%, 55%, 60%, 65%, 70%, 75%, 80%, 85%, 90%, 95%, 96%, 97%, 98%, or 99% of histone tails of histones bound to DNAs within 200 bps flanking a target sequence in the epigenetically edited chromosome in a cell are methylated as compared to the original state of the chromosome or the chromosome in a comparable cell not contacted with the epigenetic editor. In some embodiments, one single histone tail of histones bound to DNAs within 200 bps flanking a target sequence in the epigenetically edited chromosome in a cell is methylated as compared to the original state of the chromosome or the chromosome in a comparable cell not contacted with the epigenetic editor. In some embodiments, one single histone octamer bound to DNAs within 200 bps flanking a target sequence in the epigenetically edited chromosome in a cell is methylated as compared to the original state of the chromosome or the chromosome in a comparable cell not contacted with the epigenetic editor. In some embodiments, the histone is histone H3 and methylation is at Lysine 9, marking the target gene in the epigenetically edited chromosome for repressed expression. In some embodiments, the histone is histone H3 and methylation is at Lysine 4, marking the target gene in the epigenetically edited chromosome for increased expression.

[0327] In some embodiments, all histone tails of histones bound to DNA nucleotides within 200 bps flanking a promoter sequence of a target gene in the epigenetically edited chromosome in a cell are demethylated as compared to the original state of the chromosome or the chromosome in a comparable cell not contacted with the epigenetic editor. In some embodiments, at least 1, 2, 3, 4, 5, 6, 7, 8, 9, 10, 11, 12, 13, 14, 15, 16, 17, 18, 19, 20 or more histone tails of histones bound to DNAs within 200 bps flanking a target sequence in the epigenetically edited chromosome in a cell are demethylated as compared to the original state of the chromosome or the chromosome in a comparable cell not contacted with the epigenetic editor. In some embodiments, at least 5%, 6%, 7%, 8%, 9%, 10%, 15%, 20%, 25%, 30%, 35%, 40%, 45%, 50%, 55%, 60%, 65%, 70%, 75%, 80%, 85%, 90%, 95%, 96%, 97%, 98%, or 99% of histone tails of histones bound to DNAs within 200 bps flanking a target sequence in the epigenetically edited chromosome in a cell are demethylated as compared to the original state of the chromosome or the chromosome in a comparable cell not contacted with the epigenetic editor. In some embodiments, one single histone tail of histones bound to DNAs within 200 bps flanking a target sequence in the epigenetically edited chromosome in a cell is demethylated as compared to the original state of the chromosome or the chromosome in a comparable cell not contacted with the epigenetic editor. In some embodiments, one single histone octamer bound to DNAs within 200 bps flanking a target sequence in the epigenetically edited chromosome in a cell is demethylated as compared to the original state of the chromosome or the chromosome in a comparable cell not contacted with the epigenetic editor. In some embodiments, the histone is histone H3 and methylation is at Lysine 9, marking the target gene in the epigenetically edited chromosome for repressed expression. In some embodiments, the histone is histone H3 and methylation is at Lysine 4, marking the target gene in the epigenetically edited chromosome for increased expression.

[0328] In some embodiments, all histone tails of histones bound to DNA nucleotides within 200 bps flanking a promoter sequence of a target gene in the epigenetically edited chromosome in a cell are acetylated as compared to the original state of the chromosome or the chromosome in a comparable cell not contacted with the epigenetic editor. In some embodiments, at least 1, 2, 3, 4, 5, 6, 7, 8, 9, 10, 11, 12, 13, 14, 15, 16, 17, 18, 19, 20 or more histone tails of histones bound to DNAs within 200 bps flanking a target sequence in the epigenetically edited chromosome in a cell are acetylated as compared to the original state of the chromosome or the chromosome in a comparable cell not contacted with the epigenetic editor. In some embodiments, at least 5%, 6%, 7%, 8%, 9%, 10%, 15%, 20%, 25%, 30%, 35%, 40%, 45%, 50%, 55%, 60%, 65%, 70%, 75%, 80%, 85%, 90%, 95%, 96%, 97%, 98%, or 99% of histone tails of histones bound to DNAs within 200 bps flanking a target sequence in the epigenetically edited chromosome in a cell are acetylated as compared to the original state of the chromosome or the chromosome in a comparable cell not contacted with the epigenetic editor. In some embodiments, one single histone tail of histones bound to DNAs within 200 bps flanking a target sequence in the epigenetically edited chromosome in a cell is acetylated as compared to the original state of the chromosome or the chromosome in a comparable cell not contacted with the epigenetic editor. In some embodiments, one single histone octamer bound to DNAs within 200 bps flanking a target sequence in the epigenetically edited chromosome in a cell is acetylated as compared to the original state of the chromosome or the chromosome in a comparable cell not contacted with the epigenetic editor.

[0329] In some embodiments, all histone tails of histones bound to DNA nucleotides within 200 bps flanking a promoter sequence of a target gene in the epigenetically edited chromosome in a cell are deacetylated as compared to the original state of the chromosome or the chromosome in a comparable cell not contacted with the epigenetic editor. In some embodiments, at least 1, 2, 3, 4, 5, 6, 7, 8, 9, 10, 11, 12, 13, 14, 15, 16, 17, 18, 19, 20 or more histone tails of histones bound to DNAs within 200 bps flanking a target sequence in the epigenetically edited chromosome in a cell are deacetylated as compared to the original state of the chromosome or the chromosome in a comparable cell not contacted with the epigenetic editor. In some embodiments, at least 5%, 6%, 7%, 8%, 9%, 10%, 15%, 20%, 25%, 30%, 35%, 40%, 45%, 50%, 55%, 60%, 65%, 70%, 75%, 80%, 85%, 90%, 95%, 96%, 97%, 98%, or 99% of histone tails of histones bound to DNAs within 200 bps flanking a target sequence in the epigenetically edited chromosome in a cell are deacetylated as compared to the original state of the chromosome or the chromosome in a comparable cell not contacted with the epigenetic editor. In some embodiments, one single histone tail of histones bound to DNAs within 200 bps flanking a target sequence in the epigenetically edited chromosome in a cell is deacetylated as compared to the original state of the chromosome or the chromosome in a comparable cell not contacted with the epigenetic editor. In some embodiments, one single histone octamer bound to DNAs within 200 bps flanking a target sequence in the epigenetically edited chromosome in a cell is deacetylated as compared to the original state of the chromosome or the chromosome in a comparable cell not contacted with the epigenetic editor.

[0330] In some embodiments, the effector domain comprises a histone methyltransferase domain. For example, repression (or silencing) may result from repressive chromatin markers, methylation of DNA, methylation of histone residues (e.g., H3K9, H3K27), or deacetylation of histone residues.) on chromatin containing a target nucleic acid sequence. Without intending to be bound by any theory, the method can be used to change epigenetic state by, for example, closing chromatin via methylation or introducing repressive chromatin markers on chromatin containing the target nuclei acid sequence (e.g., gene).

[0331] Specific epigenetic imprints direct gene transcription or gene silencing. For example, DNA methylation, histone modification, repressor proteins binding to silencer regions, and other transcriptional activities alter gene expression without changing the underlying DNA sequence. Thus, the transcriptional regulation allows for expression of specific genes in a particular manner, while repressing other genes. In certain instances, cell fate or function can be controlled, either for initial differentiation (e.g., during the organism's development) or to reprogram a cell or cell type (e.g., during disease such as cancer, chronic inflammation, auto-immune disease, illnesses related to various microbiomes of an organism, etc.). Histone modifications play a structural and biochemical role in gene transcription, in one avenue by formation or disruption of the nucleosome structure that binds to the histone and prevents gene transcription. Histones are basic proteins that are commonly found in the nucleus of eukaryotic cells, ranging from multicellular organisms including humans to unicellular organisms represented by fungi (mold and yeast) and ionically bind to genomic DNA. Histones usually consist of five components (H1, H2A, H2B, H3 and H4) and are highly similar across biological species. In the case of histone H4, for example, budding yeast histone H4 (full-length 102 amino acid sequence) and human histone H4 (full-length 102 amino acid sequence) are identical in 92% of the amino acid sequences and differ only in 8 residues. Among the natural proteins assumed to be present in several tens of thousands of organisms, histones are known to be proteins most highly preserved among eukaryotic species. Genomic DNA is folded with histones by ordered binding, and a complex of the both forms a basic structural unit called a nucleosome. In addition, aggregation of the nucleosomes forms a chromosomal chromatin structure. Histones are subject to modifications, such as acetylation, methylation, phosphorylation, ubiquitination, SUMOylation and the like, at their N-terminal ends called histone tails, and maintain or specifically convert the chromatin structure, thereby controlling responses such as gene expression, DNA replication, DNA repair and the like, which occur on chromosomal DNA. Post-translational modification of histones is an epigenetic regulatory mechanism, and is considered essential for the genetic regulation of eukaryotic cells. Recent studies have revealed that chromatin remodeling factors such as SWI/SNF, RSC, NURF, NRD and the like, which encourage DNA access to transcription factors by modifying the nucleosome structure, histone acetyltransferases (HATs) that regulate the acetylation state of histones, and histone deacetylases (HDACs), act as important regulators. DNA methylation occurs primarily at CpG sites (shorthand for “C-phosphate-G-” or “cytosine-phosphate-guanine”). Highly methylated areas of DNA tend to be less transcriptionally active than lesser methylated sites. Many mammalian genes have promoter regions near or including CpG islands (regions with a high frequency of CpG sites).

[0332] In particular, the unstructured N-termini of histones may be modified by at least one of acetylation, methylation, ubiquitylation, phosphorylation, sumoylation, ribosylation, citrullination O-GlcNAcylation, or crotonylation. For example, acetylation of K14 and K9 lysines of histone H3 by histone acetyltransferase enzymes may be linked to transcriptional competence in humans. Lysine acetylation may directly or indirectly create binding sites for chromatin-modifying enzymes that regulate transcriptional activation. For example, histone acetyltransferases (HATs) utilize acetyl-CoA as a cofactor and catalyze the transfer of an acetyl group to the epsilon amino group of the lysine side chains. This neutralizes the lysine's positive charge and weakens the interactions between histones and DNA, thus opening the chromosomes for transcription factors to bind and initiate transcription. Likewise, histone methylation of lysine 9 of histone H3 may be associated with heterochromatin, or transcriptionally silent chromatin. Particular DNA methylation patterns may be established and modified by at least one or more, two or more, three or more, four or more, or five or more independent DNA methyltransferases, including DNMT1, DNMT3A. and DNMT3B.

[0333] In some embodiments, the effector domain comprises a histone methyltransferase domain. In some embodiments, the effector domain comprises a DOT1L domain, a SET domain, a SUV39H1 domain, a G9a/EHMT2 protein domain, a EZH1 domain, a EZH2 domain, a SETDB1 domain, or any combination thereof. In some embodiments, the effector domain comprises a histone-lysine-N-methyltransferase SETDB1 domain.

[0334] In some embodiments, the effector domain comprises a DNA methyltransferase domain or a Histone methyltransferase domain. DNA methyltransferase domains may mediate methylation at DNA nucleotides, for example at any of an A, T, G or C nucleotide. In some embodiments, the methylated nucleotide is a N6-methyladenosine (m6A). In some embodiments, the methylated nucleotide is a 5-methylcytosine (5mC). In some embodiments, the methylation is at a CG (or CpG) dinucleotide sequence. In some embodiments, the methylation is at a CHG or CHH sequence, where H is any one of A, T, or C.

[0335] In some embodiments, the effector domain comprises a DNA methyltransferase DNMT domain that catalyzes transfer of a methyl group to cytosine, thereby repressing expression of the target gene through the recruitment of repressive regulatory proteins. In some embodiments, the effector domain comprises a DNA methyltransferase (DNMT) family protein domain. In some embodiments, the effector domain comprises a DNMT1 domain. In some embodiments, the effector domain comprises a TRDMT1 domain. In some embodiments, the effector domain comprises a DNMT3 domain. In some embodiments, the effector domain comprises a DNMT3A domain. In some embodiments, the effector domain comprises a DNMT3B domain. In some embodiments, the effector domain comprises a DNMT3C domain. In some embodiments, the effector domain comprises a DNMT3L domain. In some embodiments, the effector domain comprises a fusion of DNMT3A-DNMT3L domain.

[0336] Exemplary methyltransferase that may be part of an epigenetic effector domain are provided in Table 1 below.

TABLE 1
Exemplary methyltransferase sequences that
may be used in epigenetic effector domains

| Protein Name | Species | Target | Protein Sequence |
|---|---|---|---|
| DNMT1 | Human | 5mC | SEQ ID NO.: 32 |
| DNMT3A | Human | 5mC | SEQ ID NO.: 33 |
| DNMT3B | Human | 5mC | SEQ ID NO.: 35 |
| DNMT3C | Mouse | 5mC | SEQ ID NO.: 36 |
| DNMT3L | Human | 5mC | SEQ ID NO.: 37 |
| DNMT3L | Mouse | 5mC | SEQ ID NO.: 39 |
| TRDMT1 | Human | tRNA 5mC | SEQ ID NO.: 41 |
| (DNMT2) | | | |
| M. MpeI | Mycoplasma penetrans | 5mC | SEQ ID NO.: 42 |
| M. SssI | Spiroplasma monobiae | 5mC | SEQ ID NO.: 43 |
| M. HpaII | Haemophilus parainfluenzae | 5mC (CCGG) | SEQ ID NO.: 44 |
| M. AluI | Arthrobacter luteus | 5mC (AGCT) | SEQ ID NO.: 45 |
| M. HaeIII | Haemophilus aegyptius | 5mC (GGCC) | SEQ ID NO.: 46 |
| M. HhaI | Haemophilus haemolyticus | 5mC (GCGC) | SEQ ID NO.: 47 |
| M. MspI | Moraxella | 5mC (CCGG) | SEQ ID NO.: 48 |
| Masc1 | Ascobolus | 5mC | SEQ ID NO.: 49 |
| MET1 | Arabidopsis | 5mC | SEQ ID NO.: 50 |
| Masc2 | Ascobolus | 5mC | SEQ ID NO.: 51 |
| Dim-2 | Neurospora | 5mC | SEQ ID NO.: 52 |
| dDnmt2 | Drosophila | 5mC | SEQ ID NO.: 53 |
| Pmt1 | S. Pombe | 5mC | SEQ ID NO.: 54 |
| DRM1 | Arabidopsis | 5mC | SEQ ID NO.: 55 |
| DRM2 | Arabidopsis | 5mC | SEQ ID NO.: 56 |
| CMT1 | Arabidopsis | 5mC | SEQ ID NO.: 57 |
| CMT2 | Arabidopsis | 5mC | SEQ ID NO.: 58 |
| CMT3 | Arabidopsis | 5mC | SEQ ID NO.: 59 |
| Rid | Neurospora | 5mC | SEQ ID NO.: 60 |
| hsdM gene | bacteria (E.coli, strain 12) | m6A | SEQ ID NO.: 61 |
| hsdS gene | bacteria (E.coli, strain 12) | m6A | SEQ ID NO.: 62 |
| M. TaqI | bacteria; Thermus aquaticus | m6A | SEQ ID NO.: 63 |
| M. EcoDam | E. coli | m6A | SEQ ID NO.: 64 |
| M. CcrMI | Caulobacter crescentus | m6A | SEQ ID NO.: 65 |
| CamA | Clostridioides difficile | m6A | SEQ ID NO.: 66 |

[0337] In some embodiments, the effector domain recruits one or more protein domains that repress expression of the target gene. In some embodiments, the effector domain interacts with a scaffold protein domain that recruits one or more protein domains that repress expression of the target gene. For example, the effector domain may recruit or interact with a scaffold protein domain that recruits a PRMT protein, a HDAC protein, a SETDB1 protein, or a NuRD protein domain. In some embodiments, the effector domain comprises a Krippel associated box (KRAB) repression domain; a Repressor Element Silencing Transcription Factor (REST) repression domain, KRAB-associated protein 1 (KAP1) domain, a MAD domain, a FKHR (forkhead in rhabdosarcoma gene) repressor domain, aEGR-1 (early growth response gene product-1) repressor domain, a ets2 repressor factor repressor domain (ERD), a MAD smSIN3 interaction domain (SID), a WRPW motif (SEQ ID NO: 1162) of the hairy-related basic helix-loop-helix (bHLH) repressor proteins; an HP1 alpha chromo-shadow repression domain, or any combination thereof. In some embodiments, the effector domain comprises a KRAB domain. In some embodiments, the effector domain comprises a Tripartite motif containing 28 (TRIM28, TIF1-beta, or KAP1) protein.

[0338] In some embodiments, an effector domain comprises a protein domain that represses expression of the target gene. For example, the effector domain may comprise a functional domain derived from a zinc finger repressor protein. In some embodiments, the effector domain comprises a functional repression domain derived from a KOX1/ZNF10 domain, a KOX8/ZNF708 domain, a ZNF43 domain, a ZNF184 domain, a ZNF91 KRAB domain, a HPF4 domain, a HTF10 domain or a HTF34 domain or any combination thereof. In some embodiments, the effector domain comprises a functional repression domain derived from a ZIM3 protein domain, a ZNF436 domain, a ZNF257 domain, a ZNF675 domain, a ZNF490 domain, a ZNF320 domain, a ZNF331 domain, a ZNF816 domain, a ZNF680 domain, a ZNF41 domain, a ZNF189 domain, a ZNF528 domain, a ZNF543 domain, a ZNF554 domain, a ZNF140 domain, a ZNF610 domain, a ZNF264 domain, a ZNF350 domain, a ZNF8 domain, a ZNF582 domain, a ZNF30 domain, a ZNF324 domain, a ZNF98 domain, a ZNF669 domain, a ZNF677 domain, a ZNF596 domain, a ZNF214 domain, a ZNF37A domain, a ZNF34 domain, a ZNF250 domain, a ZNF547 domain, a ZNF273 domain, a ZNF354A domain, a ZFP82 domain, a ZNF224 domain, a ZNF33A domain, a ZNF45 domain, a ZNF175 domain, a ZNF595 domain, a ZNF184 domain, a ZNF419 domain, a ZFP28-1 domain, a ZFP28-2 domain, a ZNF18 domain, a ZNF213 domain, a ZNF394 domain, a ZFP1 domain, a ZFP14 domain, a ZNF416 domain, a ZNF557 domain, a ZNF566 domain, a ZNF729 domain, a ZIM2 domain, a ZNF254 domain, a ZNF764 domain, a ZNF785 domain or any combination thereof. In some embodiments, the domain is a ZIM3 domain, a ZNF554 domain, a ZNF264 domain, a ZNF324 domain, a ZNF354A domain, a ZNF189 domain, a ZNF543 domain, a ZFP82 domain, a ZNF669 domain, or a ZNF582 domain or any combination thereof. In some embodiments, the domain is a ZIM3 domain, a ZNF554 domain, a ZNF264 domain, a ZNF324 domain, or a ZNF354A domain or any combination thereof. In some embodiments, the domain is a ZIM3 domain.

[0339] In some embodiments, an effector domain can be an alternate KRAB domain (e.g.,). Alternatively or in addition to, an effector domain can be a non-KRAB domain (e.g.)

[0340] In some embodiments, the protein fusion construct can have 1 effector domain, 2 effector domains, 3 effector domains, 4 effector domains, 5 effector domains, 6 effector domains, 7 effector domains, 8 effector domains, 9 effector domains, or 10 effector domains.

[0341] Sequences of exemplary functional domains that may reduce or silence target gene expression are provided in Table 2 below. Further examples of repressors and repressor domains can be found in PCT/US2021/030643 and Tycko et al. (Tycko J, DelRosso N, Hess G T, Aradhana, Banerjee A, Mukund A, Van M V, Ego B K, Yao D, Spees K, Suzuki P, Marinov G K, Kundaje A, Bassik M C, Bintu L. High-Throughput Discovery and Characterization of Human Transcriptional Effectors. Cell. 2020 Dec. 23; 183(7):2020-2035.e16. doi: 10.1016/j.cell.2020.11.024. Epub 2020 Dec. 15. PMID: 33326746; PMCID: PMC8178797.), which are incorporated here by reference to it entirety.

TABLE 2
Exemplary effector domains that may
reduce or silence gene expression

| Protein | Protein Sequence |
|---|---|
| ZIM3 | SEQ ID NO.: 67 |
| ZNF436 | SEQ ID NO.: 68 |
| ZNF257 | SEQ ID NO.: 69 |
| ZNF675 | SEQ ID NO.: 70 |
| ZNF490 | SEQ ID NO.: 71 |
| ZNF320 | SEQ ID NO.: 72 |
| ZNF331 | SEQ ID NO.: 73 |
| ZNF816 | SEQ ID NO.: 74 |
| ZNF680 | SEQ ID NO.: 75 |
| ZNF41 | SEQ ID NO.: 76 |
| ZNF189 | SEQ ID NO.: 77 |
| ZNF528 | SEQ ID NO.: 78 |
| ZNF543 | SEQ ID NO.: 79 |
| ZNF554 | SEQ ID NO.: 80 |
| ZNF140 | SEQ ID NO.: 81 |
| ZNF610 | SEQ ID NO.: 82 |
| ZNF264 | SEQ ID NO.: 83 |
| ZNF350 | SEQ ID NO.: 84 |
| ZNF8 | SEQ ID NO.: 85 |
| ZNF582 | SEQ ID NO.: 86 |
| ZNF30 | SEQ ID NO.: 87 |
| ZNF324 | SEQ ID NO.: 88 |
| ZNF98 | SEQ ID NO.: 89 |
| ZNF669 | SEQ ID NO.: 90 |
| ZNF677 | SEQ ID NO.: 91 |
| ZNF596 | SEQ ID NO.: 92 |
| ZNF214 | SEQ ID NO.: 93 |
| ZNF37A | SEQ ID NO.: 94 |
| ZNF34 | SEQ ID NO.: 95 |
| ZNF250 | SEQ ID NO.: 96 |
| ZNF547 | SEQ ID NO.: 97 |
| ZNF273 | SEQ ID NO.: 98 |
| ZNF354A | SEQ ID NO.: 99 |
| ZFP82 | SEQ ID NO.: 100 |
| ZNF224 | SEQ ID NO.: 101 |
| ZNF33A | SEQ ID NO.: 102 |
| ZNF45 | SEQ ID NO.: 103 |
| ZNF175 | SEQ ID NO.: 104 |
| ZNF595 | SEQ ID NO.: 105 |
| ZNF184 | SEQ ID NO.: 106 |
| ZNF419 | SEQ ID NO.: 107 |
| ZFP28-1 | SEQ ID NO.: 108 |
| ZFP28-2 | SEQ ID NO.: 109 |
| ZNF18 | SEQ ID NO.: 110 |
| ZNF213 | SEQ ID NO.: 111 |
| ZNF394 | SEQ ID NO.: 112 |
| ZFP1 | SEQ ID NO.: 113 |
| ZFP14 | SEQ ID NO.: 114 |
| ZNF416 | SEQ ID NO.: 115 |
| ZNF557 | SEQ ID NO.: 116 |
| ZNF566 | SEQ ID NO.: 117 |
| ZNF729 | SEQ ID NO.: 118 |
| ZIM2 | SEQ ID NO.: 119 |
| ZNF254 | SEQ ID NO.: 120 |
| ZNF764 | SEQ ID NO.: 121 |
| ZNF785 | SEQ ID NO.: 122 |
| ZNF10 (KOX1) | SEQ ID NO.: 123 |
| CBX5 (chromoshadow domain) | SEQ ID NO.: 124 |
| RYBP (YAF2_RYBP component of PRC1) | SEQ ID NO.: 125 |
| YAF2 (YAF2_RYBP component of PRC1) | SEQ ID NO.: 126 |
| MGA (component of PRC1.6) | SEQ ID NO.: 127 |
| CBX1 (chromoshadow) | SEQ ID NO.: 128 |
| SCMH1 (SAM_1/SPM) | SEQ ID NO.: 129 |
| MPP8 (Chromodomain) | SEQ ID NO.: 130 |
| SUMO3 (Rad60-SLD) | SEQ ID NO.: 131 |
| HERC2 (Cyt-b5) | SEQ ID NO.: 132 |
| BIN1 (SH3_9) | SEQ ID NO.: 133 |
| PCGF2 (RING finger protein domain) | SEQ ID NO.: 134 |
| TOX (HMG box) | SEQ ID NO.: 135 |
| FOXA1 (HNF3A C-terminal domain) | SEQ ID NO.: 136 |
| FOXA2 (HNF3B C-terminal domain) | SEQ ID NO.: 137 |
| IRF2BP1 (IRF-2BP1_2 N-terminal domain) | SEQ ID NO.: 138 |
| IRF2BP2 (IRF-2BP1_2 N-terminal domain) | SEQ ID NO.: 139 |
| IRF2BPL IRF-2BP1_2 N-terminal domain | SEQ ID NO.: 140 |
| HOXA13 (homeodomain) | SEQ ID NO.: 141 |
| HOXB13 (homeodomain) | SEQ ID NO.: 142 |
| HOXC13 (homeodomain) | SEQ ID NO.: 143 |
| HOXA11 (homeodomain) | SEQ ID NO.: 144 |
| HOXC11 (homeodomain) | SEQ ID NO.: 145 |
| HOXC10 (homeodomain) | SEQ ID NO.: 146 |
| HOXA10 (homeodomain) | SEQ ID NO.: 147 |
| HOXB9 (homeodomain) | SEQ ID NO.: 148 |
| HOXA9 (homeodomain) | SEQ ID NO.: 149 |

[0342] Sequences of additional exemplary functional domains that may reduce or silence target gene expression are provided in Table 3 below.

TABLE 3
Exemplary effector domains that may
reduce or silence gene expression

| Gene name | Extended Domain sequence |
|---|---|
| ZFP28_HUMAN | SEQ ID NO.: 150 |
| ZN334_HUMAN | SEQ ID NO.: 151 |
| ZN568_HUMAN | SEQ ID NO.: 152 |
| ZN37A_HUMAN | SEQ ID NO.: 153 |
| ZN181_HUMAN | SEQ ID NO.: 154 |
| ZN510_HUMAN | SEQ ID NO.: 155 |
| ZN862_HUMAN | SEQ ID NO.: 156 |
| ZN140_HUMAN | SEQ ID NO.: 157 |
| ZN208_HUMAN | SEQ ID NO.: 158 |
| ZN248_HUMAN | SEQ ID NO.: 159 |
| ZN571_HUMAN | SEQ ID NO.: 160 |
| ZN699_HUMAN | SEQ ID NO.: 161 |
| ZN726_HUMAN | SEQ ID NO.: 162 |
| ZIK1_HUMAN | SEQ ID NO.: 163 |
| ZNF2_HUMAN | SEQ ID NO.: 164 |
| Z705F_HUMAN | SEQ ID NO.: 165 |
| ZNF14_HUMAN | SEQ ID NO.: 166 |
| ZN471_HUMAN | SEQ ID NO.: 167 |
| ZN624_HUMAN | SEQ ID NO.: 168 |
| ZNF84_HUMAN | SEQ ID NO.: 169 |
| ZNF7_HUMAN | SEQ ID NO.: 170 |
| ZN891_HUMAN | SEQ ID NO.: 171 |
| ZN337_HUMAN | SEQ ID NO.: 172 |
| Z705G_HUMAN | SEQ ID NO.: 173 |
| ZN529_HUMAN | SEQ ID NO.: 174 |
| ZN729_HUMAN | SEQ ID NO.: 175 |
| ZN419_HUMAN | SEQ ID NO.: 176 |
| Z705A_HUMAN | SEQ ID NO.: 177 |
| ZNF45_HUMAN | SEQ ID NO.: 178 |
| ZN302_HUMAN | SEQ ID NO.: 179 |
| ZN486_HUMAN | SEQ ID NO.: 180 |
| ZN621_HUMAN | SEQ ID NO.: 181 |
| ZN688_HUMAN | SEQ ID NO.: 182 |
| ZN33A_HUMAN | SEQ ID NO.: 183 |
| ZN554_HUMAN | SEQ ID NO.: 184 |
| ZN878_HUMAN | SEQ ID NO.: 185 |
| ZN772_HUMAN | SEQ ID NO.: 186 |
| ZN224_HUMAN | SEQ ID NO.: 187 |
| ZN184_HUMAN | SEQ ID NO.: 188 |
| ZN544_HUMAN | SEQ ID NO.: 189 |
| ZNF57_HUMAN | SEQ ID NO.: 190 |
| ZN283_HUMAN | SEQ ID NO.: 191 |
| ZN549_HUMAN | SEQ ID NO.: 192 |
| ZN211_HUMAN | SEQ ID NO.: 193 |
| ZN615_HUMAN | SEQ ID NO.: 194 |
| ZN253_HUMAN | SEQ ID NO.: 195 |
| ZN226_HUMAN | SEQ ID NO.: 196 |
| ZN730_HUMAN | SEQ ID NO.: 197 |
| Z585A_HUMAN | SEQ ID NO.: 198 |
| ZN732_HUMAN | SEQ ID NO.: 199 |
| ZN681_HUMAN | SEQ ID NO.: 200 |
| ZN667_HUMAN | SEQ ID NO.: 201 |
| ZN649_HUMAN | SEQ ID NO.: 202 |
| ZN470_HUMAN | SEQ ID NO.: 203 |
| ZN484_HUMAN | SEQ ID NO.: 204 |
| ZN431_HUMAN | SEQ ID NO.: 205 |
| ZN382_HUMAN | SEQ ID NO.: 206 |
| ZN254_HUMAN | SEQ ID NO.: 207 |
| ZN124_HUMAN | SEQ ID NO.: 208 |
| ZN607_HUMAN | SEQ ID NO.: 209 |
| ZN317_HUMAN | SEQ ID NO.: 210 |
| ZN620_HUMAN | SEQ ID NO.: 211 |
| ZN141_HUMAN | SEQ ID NO.: 212 |
| ZN584_HUMAN | SEQ ID NO.: 213 |
| ZN540_HUMAN | SEQ ID NO.: 214 |
| ZN75D_HUMAN | SEQ ID NO.: 215 |
| ZN555_HUMAN | SEQ ID NO.: 216 |
| ZN658_HUMAN | SEQ ID NO.: 217 |
| ZN684_HUMAN | SEQ ID NO.: 218 |
| RBAK_HUMAN | SEQ ID NO.: 219 |
| ZN829_HUMAN | SEQ ID NO.: 220 |
| ZN582_HUMAN | SEQ ID NO.: 221 |
| ZN112_HUMAN | SEQ ID NO.: 222 |
| ZN716_HUMAN | SEQ ID NO.: 223 |
| HKR1_HUMAN | SEQ ID NO.: 224 |
| ZN350_HUMAN | SEQ ID NO.: 225 |
| ZN480_HUMAN | SEQ ID NO.: 226 |
| ZN416_HUMAN | SEQ ID NO.: 227 |
| ZNF92_HUMAN | SEQ ID NO.: 228 |
| ZN100_HUMAN | SEQ ID NO.: 229 |
| ZN736_HUMAN | SEQ ID NO.: 230 |
| ZNF74_HUMAN | SEQ ID NO.: 231 |
| CBX1_HUMAN | SEQ ID NO.: 232 |
| ZN443_HUMAN | SEQ ID NO.: 233 |
| ZN195_HUMAN | SEQ ID NO.: 234 |
| ZN530_HUMAN | SEQ ID NO.: 235 |
| ZN782_HUMAN | SEQ ID NO.: 236 |
| ZN791_HUMAN | SEQ ID NO.: 237 |
| ZN331_HUMAN | SEQ ID NO.: 238 |
| Z354C_HUMAN | SEQ ID NO.: 239 |
| ZN157_HUMAN | SEQ ID NO.: 240 |
| ZN727_HUMAN | SEQ ID NO.: 241 |
| ZN550_HUMAN | SEQ ID NO.: 242 |
| ZN793_HUMAN | SEQ ID NO.: 243 |
| ZN235_HUMAN | SEQ ID NO.: 244 |
| ZNF8_HUMAN | SEQ ID NO.: 245 |
| ZN724_HUMAN | SEQ ID NO.: 246 |
| ZN573_HUMAN | SEQ ID NO.: 247 |
| ZN577_HUMAN | SEQ ID NO.: 248 |
| ZN789_HUMAN | SEQ ID NO.: 249 |
| ZN718_HUMAN | SEQ ID NO.: 250 |
| ZN300_HUMAN | SEQ ID NO.: 251 |
| ZN383_HUMAN | SEQ ID NO.: 252 |
| ZN429_HUMAN | SEQ ID NO.: 253 |
| ZN677_HUMAN | SEQ ID NO.: 254 |
| ZN850_HUMAN | SEQ ID NO.: 255 |
| ZN454_HUMAN | SEQ ID NO.: 256 |
| ZN257_HUMAN | SEQ ID NO.: 257 |
| ZN264_HUMAN | SEQ ID NO.: 258 |
| ZFP82_HUMAN | SEQ ID NO.: 259 |
| ZFP14_HUMAN | SEQ ID NO.: 260 |
| ZN485_HUMAN | SEQ ID NO.: 261 |
| ZN737_HUMAN | SEQ ID NO.: 262 |
| ZNF44_HUMAN | SEQ ID NO.: 263 |
| ZN596_HUMAN | SEQ ID NO.: 264 |
| ZN565_HUMAN | SEQ ID NO.: 265 |
| ZN543_HUMAN | SEQ ID NO.: 266 |
| ZFP69_HUMAN | SEQ ID NO.: 267 |
| SUMO1_HUMAN | SEQ ID NO.: 268 |
| ZNF12_HUMAN | SEQ ID NO.: 269 |
| ZN169_HUMAN | SEQ ID NO.: 270 |
| ZN433_HUMAN | SEQ ID NO.: 271 |
| SUMO3_HUMAN | SEQ ID NO.: 272 |
| ZNF98_HUMAN | SEQ ID NO.: 273 |
| ZN175_HUMAN | SEQ ID NO.: 274 |
| ZN347_HUMAN | SEQ ID NO.: 275 |
| ZNF25_HUMAN | SEQ ID NO.: 276 |
| ZN519_HUMAN | SEQ ID NO.: 277 |
| Z585B_HUMAN | SEQ ID NO.: 278 |
| ZIM3_HUMAN | SEQ ID NO.: 279 |
| ZN517_HUMAN | SEQ ID NO.: 280 |
| ZN846_HUMAN | SEQ ID NO.: 281 |
| ZN230_HUMAN | SEQ ID NO.: 282 |
| ZNF66_HUMAN | SEQ ID NO.: 283 |
| ZFP1_HUMAN | SEQ ID NO.: 284 |
| ZN713_HUMAN | SEQ ID NO.: 285 |
| ZN816_HUMAN | SEQ ID NO.: 286 |
| ZN426_HUMAN | SEQ ID NO.: 287 |
| ZN674_HUMAN | SEQ ID NO.: 288 |
| ZN627_HUMAN | SEQ ID NO.: 289 |
| ZNF20_HUMAN | SEQ ID NO.: 290 |
| Z587B_HUMAN | SEQ ID NO.: 291 |
| ZN316_HUMAN | SEQ ID NO.: 292 |
| ZN233_HUMAN | SEQ ID NO.: 293 |
| ZN611_HUMAN | SEQ ID NO.: 294 |
| ZN556_HUMAN | SEQ ID NO.: 295 |
| ZN234_HUMAN | SEQ ID NO.: 296 |
| ZN560_HUMAN | SEQ ID NO.: 297 |
| ZNF77_HUMAN | SEQ ID NO.: 298 |
| ZN682_HUMAN | SEQ ID NO.: 299 |
| ZN614_HUMAN | SEQ ID NO.: 300 |
| ZN785_HUMAN | SEQ ID NO.: 301 |
| ZN445_HUMAN | SEQ ID NO.: 302 |
| ZFP30_HUMAN | SEQ ID NO.: 303 |
| ZN225_HUMAN | SEQ ID NO.: 304 |
| ZN551_HUMAN | SEQ ID NO.: 305 |
| ZN610_HUMAN | SEQ ID NO.: 306 |
| ZN528_HUMAN | SEQ ID NO.: 307 |
| ZN284_HUMAN | SEQ ID NO.: 308 |
| ZN418_HUMAN | SEQ ID NO.: 309 |
| MPP8_HUMAN | SEQ ID NO.: 310 |
| ZN490_HUMAN | SEQ ID NO.: 311 |
| ZN805_HUMAN | SEQ ID NO.: 312 |
| Z780B_HUMAN | SEQ ID NO.: 313 |
| ZN763_HUMAN | SEQ ID NO.: 314 |
| ZN285_HUMAN | SEQ ID NO.: 315 |
| ZNF85_HUMAN | SEQ ID NO.: 316 |
| ZN223_HUMAN | SEQ ID NO.: 317 |
| ZNF90_HUMAN | SEQ ID NO.: 318 |
| ZN557_HUMAN | SEQ ID NO.: 319 |
| ZN425_HUMAN | SEQ ID NO.: 320 |
| ZN229_HUMAN | SEQ ID NO.: 321 |
| ZN606_HUMAN | SEQ ID NO.: 322 |
| ZN155_HUMAN | SEQ ID NO.: 323 |
| ZN222_HUMAN | SEQ ID NO.: 324 |
| ZN442_HUMAN | SEQ ID NO.: 325 |
| ZNF91_HUMAN | SEQ ID NO.: 326 |
| ZN135_HUMAN | SEQ ID NO.: 327 |
| ZN778_HUMAN | SEQ ID NO.: 328 |
| RYBP_HUMAN | SEQ ID NO.: 329 |
| ZN534_HUMAN | SEQ ID NO.: 330 |
| ZN586_HUMAN | SEQ ID NO.: 331 |
| ZN567_HUMAN | SEQ ID NO.: 332 |
| ZN440_HUMAN | SEQ ID NO.: 333 |
| ZN583_HUMAN | SEQ ID NO.: 334 |
| ZN441_HUMAN | SEQ ID NO.: 335 |
| ZNF43_HUMAN | SEQ ID NO.: 336 |
| CBX5_HUMAN | SEQ ID NO.: 337 |
| ZN589_HUMAN | SEQ ID NO.: 338 |
| ZNF10_HUMAN | SEQ ID NO.: 339 |
| ZN563_HUMAN | SEQ ID NO.: 340 |
| ZN561_HUMAN | SEQ ID NO.: 341 |
| ZN136_HUMAN | SEQ ID NO.: 342 |
| ZN630_HUMAN | SEQ ID NO.: 343 |
| ZN527_HUMAN | SEQ ID NO.: 344 |
| ZN333_HUMAN | SEQ ID NO.: 345 |
| Z324B_HUMAN | SEQ ID NO.: 346 |
| ZN786_HUMAN | SEQ ID NO.: 347 |
| ZN709_HUMAN | SEQ ID NO.: 348 |
| ZN792_HUMAN | SEQ ID NO.: 349 |
| ZN599_HUMAN | SEQ ID NO.: 350 |
| ZN613_HUMAN | SEQ ID NO.: 351 |
| ZF69B_HUMAN | SEQ ID NO.: 352 |
| ZN799_HUMAN | SEQ ID NO.: 353 |
| ZN569_HUMAN | SEQ ID NO.: 354 |
| ZN564_HUMAN | SEQ ID NO.: 355 |
| ZN546_HUMAN | SEQ ID NO.: 356 |
| ZFP92_HUMAN | SEQ ID NO.: 357 |
| YAF2_HUMAN | SEQ ID NO.: 358 |
| ZN723_HUMAN | SEQ ID NO.: 359 |
| ZNF34_HUMAN | SEQ ID NO.: 360 |
| ZN439_HUMAN | SEQ ID NO.: 361 |
| ZFP57_HUMAN | SEQ ID NO.: 362 |
| ZNF19_HUMAN | SEQ ID NO.: 363 |
| ZN404_HUMAN | SEQ ID NO.: 364 |
| ZN274_HUMAN | SEQ ID NO.: 365 |
| CBX3_HUMAN | SEQ ID NO.: 366 |
| ZNF30_HUMAN | SEQ ID NO.: 367 |
| ZN250_HUMAN | SEQ ID NO.: 368 |
| ZN570_HUMAN | SEQ ID NO.: 369 |
| ZN675_HUMAN | SEQ ID NO.: 370 |
| ZN695_HUMAN | SEQ ID NO.: 371 |
| ZN548_HUMAN | SEQ ID NO.: 372 |
| ZN132_HUMAN | SEQ ID NO.: 373 |
| ZN738_HUMAN | SEQ ID NO.: 374 |
| ZN420_HUMAN | SEQ ID NO.: 375 |
| ZN626_HUMAN | SEQ ID NO.: 376 |
| ZN559_HUMAN | SEQ ID NO.: 377 |
| ZN460_HUMAN | SEQ ID NO.: 378 |
| ZN268_HUMAN | SEQ ID NO.: 379 |
| ZN304_HUMAN | SEQ ID NO.: 380 |
| ZIM2_HUMAN | SEQ ID NO.: 381 |
| ZN605_HUMAN | SEQ ID NO.: 382 |
| ZN844_HUMAN | SEQ ID NO.: 383 |
| SUMO5_HUMAN | SEQ ID NO.: 384 |
| ZN101_HUMAN | SEQ ID NO.: 385 |
| ZN783_HUMAN | SEQ ID NO.: 386 |
| ZN417_HUMAN | SEQ ID NO.: 387 |
| ZN182_HUMAN | SEQ ID NO.: 388 |
| ZN823_HUMAN | SEQ ID NO.: 389 |
| ZN177_HUMAN | SEQ ID NO.: 390 |
| ZN197_HUMAN | SEQ ID NO.: 391 |
| ZN717_HUMAN | SEQ ID NO.: 392 |
| ZN669_HUMAN | SEQ ID NO.: 393 |
| ZN256_HUMAN | SEQ ID NO.: 394 |
| ZN251_HUMAN | SEQ ID NO.: 395 |
| CBX4_HUMAN | SEQ ID NO.: 396 |
| PCGF2_HUMAN | SEQ ID NO.: 397 |
| CDY2_HUMAN | SEQ ID NO.: 398 |
| CDYL2_HUMAN | SEQ ID NO.: 399 |
| HERC2_HUMAN | SEQ ID NO.: 400 |
| ZN562_HUMAN | SEQ ID NO.: 401 |
| ZN461_HUMAN | SEQ ID NO.: 402 |
| Z324A_HUMAN | SEQ ID NO.: 403 |
| ZN766_HUMAN | SEQ ID NO.: 404 |
| ID2_HUMAN | SEQ ID NO.: 405 |
| TOX_HUMAN | SEQ ID NO.: 406 |
| ZN274_HUMAN | SEQ ID NO.: 407 |
| SCMH1_HUMAN | SEQ ID NO.: 408 |
| ZN214_HUMAN | SEQ ID NO.: 409 |
| CBX7_HUMAN | SEQ ID NO.: 410 |
| ID1_HUMAN | SEQ ID NO.: 411 |
| CREM_HUMAN | SEQ ID NO.: 412 |
| SCX_HUMAN | SEQ ID NO.: 413 |
| ASCL1_HUMAN | SEQ ID NO.: 414 |
| ZN764_HUMAN | SEQ ID NO.: 415 |
| SCML2_HUMAN | SEQ ID NO.: 416 |
| TWST1_HUMAN | SEQ ID NO.: 417 |
| CREB1_HUMAN | SEQ ID NO.: 418 |
| TERF1_HUMAN | SEQ ID NO.: 419 |
| ID3_HUMAN | SEQ ID NO.: 420 |
| CBX8_HUMAN | SEQ ID NO.: 421 |
| CBX4_HUMAN | SEQ ID NO.: 422 |
| GSX1_HUMAN | SEQ ID NO.: 423 |
| NKX22_HUMAN | SEQ ID NO.: 424 |
| ATF1_HUMAN | SEQ ID NO.: 425 |
| TWST2_HUMAN | SEQ ID NO.: 426 |
| ZNF17_HUMAN | SEQ ID NO.: 427 |
| TOX3_HUMAN | SEQ ID NO.: 428 |
| TOX4_HUMAN | SEQ ID NO.: 429 |
| ZMYM3_HUMAN | SEQ ID NO.: 430 |
| I2BP1_HUMAN | SEQ ID NO.: 431 |
| RHXF1_HUMAN | SEQ ID NO.: 432 |
| SSX2_HUMAN | SEQ ID NO.: 433 |
| I2BPL_HUMAN | SEQ ID NO.: 434 |
| ZN680_HUMAN | SEQ ID NO.: 435 |
| CBX1_HUMAN | SEQ ID NO.: 436 |
| TRI68_HUMAN | SEQ ID NO.: 437 |
| HXA13_HUMAN | SEQ ID NO.: 438 |
| PHC3_HUMAN | SEQ ID NO.: 439 |
| TCF24_HUMAN | SEQ ID NO.: 440 |
| CBX3_HUMAN | SEQ ID NO.: 441 |
| HXB13_HUMAN | SEQ ID NO.: 442 |
| HEY1_HUMAN | SEQ ID NO.: 443 |
| PHC2_HUMAN | SEQ ID NO.: 444 |
| ZNF81_HUMAN | SEQ ID NO.: 445 |
| FIGLA_HUMAN | SEQ ID NO.: 446 |
| SAM11_HUMAN | SEQ ID NO.: 447 |
| KMT2B_HUMAN | SEQ ID NO.: 448 |
| HEY2_HUMAN | SEQ ID NO.: 449 |
| JDP2_HUMAN | SEQ ID NO.: 450 |
| HXC13_HUMAN | SEQ ID NO.: 451 |
| ASCL4_HUMAN | SEQ ID NO.: 452 |
| HHEX_HUMAN | SEQ ID NO.: 453 |
| HERC2_HUMAN | SEQ ID NO.: 454 |
| GSX2_HUMAN | SEQ ID NO.: 455 |
| BINI_HUMAN | SEQ ID NO.: 456 |
| ETV7_HUMAN | SEQ ID NO.: 457 |
| ASCL3_HUMAN | SEQ ID NO.: 458 |
| PHC1_HUMAN | SEQ ID NO.: 459 |
| OTP_HUMAN | SEQ ID NO.: 460 |
| I2BP2_HUMAN | SEQ ID NO.: 461 |
| VGLL2_HUMAN | SEQ ID NO.: 462 |
| HXA11_HUMAN | SEQ ID NO.: 463 |
| PDLI4_HUMAN | SEQ ID NO.: 464 |
| ASCL2_HUMAN | SEQ ID NO.: 465 |
| CDX4_HUMAN | SEQ ID NO.: 466 |
| ZN860_HUMAN | SEQ ID NO.: 467 |
| LMBL4_HUMAN | SEQ ID NO.: 468 |
| PDIP3_HUMAN | SEQ ID NO.: 469 |
| NKX25_HUMAN | SEQ ID NO.: 470 |
| CEBPB_HUMAN | SEQ ID NO.: 471 |
| ISL1_HUMAN | SEQ ID NO.: 472 |
| CDX2_HUMAN | SEQ ID NO.: 473 |
| PROP1_HUMAN | SEQ ID NO.: 474 |
| SIN3B_HUMAN | SEQ ID NO.: 475 |
| SMBT1_HUMAN | SEQ ID NO.: 476 |
| HXC11_HUMAN | SEQ ID NO.: 477 |
| HXC10_HUMAN | SEQ ID NO.: 478 |
| PRS6A_HUMAN | SEQ ID NO.: 479 |
| VSX1_HUMAN | SEQ ID NO.: 480 |
| NKX23_HUMAN | SEQ ID NO.: 481 |
| MTG16_HUMAN | SEQ ID NO.: 482 |
| HMX3_HUMAN | SEQ ID NO.: 483 |
| HMX1_HUMAN | SEQ ID NO.: 484 |
| KIF22_HUMAN | SEQ ID NO.: 485 |
| CSTF2_HUMAN | SEQ ID NO.: 486 |
| CEBPE_HUMAN | SEQ ID NO.: 487 |
| DLX2_HUMAN | SEQ ID NO.: 488 |
| ZMYM3_HUMAN | SEQ ID NO.: 489 |
| PPARG_HUMAN | SEQ ID NO.: 490 |
| PRIC1_HUMAN | SEQ ID NO.: 491 |
| UNC4_HUMAN | SEQ ID NO.: 492 |
| BARX2_HUMAN | SEQ ID NO.: 493 |
| ALX3_HUMAN | SEQ ID NO.: 494 |
| TCF15_HUMAN | SEQ ID NO.: 495 |
| TERA_HUMAN | SEQ ID NO.: 496 |
| VSX2_HUMAN | SEQ ID NO.: 497 |
| HXD12_HUMAN | SEQ ID NO.: 498 |
| CDX1_HUMAN | SEQ ID NO.: 499 |
| TCF23_HUMAN | SEQ ID NO.: 500 |
| ALX1_HUMAN | SEQ ID NO.: 501 |
| HXA10_HUMAN | SEQ ID NO.: 502 |
| RX_HUMAN | SEQ ID NO.: 503 |
| CXXC5_HUMAN | SEQ ID NO.: 504 |
| SCML1_HUMAN | SEQ ID NO.: 505 |
| NFIL3_HUMAN | SEQ ID NO.: 506 |
| DLX6_HUMAN | SEQ ID NO.: 507 |
| MTG8_HUMAN | SEQ ID NO.: 508 |
| CBX8_HUMAN | SEQ ID NO.: 509 |
| CEBPD_HUMAN | SEQ ID NO.: 510 |
| SEC13_HUMAN | SEQ ID NO.: 511 |
| FIP1_HUMAN | SEQ ID NO.: 512 |
| ALX4_HUMAN | SEQ ID NO.: 513 |
| LHX3_HUMAN | SEQ ID NO.: 514 |
| PRIC2_HUMAN | SEQ ID NO.: 515 |
| MAGI3_HUMAN | SEQ ID NO.: 516 |
| NELL1_HUMAN | SEQ ID NO.: 517 |
| PRRX1_HUMAN | SEQ ID NO.: 518 |
| MTG8R_HUMAN | SEQ ID NO.: 519 |
| RAX2_HUMAN | SEQ ID NO.: 520 |
| DLX3_HUMAN | SEQ ID NO.: 521 |
| DLX1_HUMAN | SEQ ID NO.: 522 |
| NKX26_HUMAN | SEQ ID NO.: 523 |
| NAB1_HUMAN | SEQ ID NO.: 524 |
| SAMD7_HUMAN | SEQ ID NO.: 525 |
| PITX3_HUMAN | SEQ ID NO.: 526 |
| WDR5_HUMAN | SEQ ID NO.: 527 |
| MEOX2_HUMAN | SEQ ID NO.: 528 |
| NAB2_HUMAN | SEQ ID NO.: 529 |
| DHX8_HUMAN | SEQ ID NO.: 530 |
| FOXA2_HUMAN | SEQ ID NO.: 531 |
| CBX6_HUMAN | SEQ ID NO.: 532 |
| EMX2_HUMAN | SEQ ID NO.: 533 |
| CPSF6_HUMAN | SEQ ID NO.: 534 |
| HXC12_HUMAN | SEQ ID NO.: 535 |
| KDM4B_HUMAN | SEQ ID NO.: 536 |
| LMBL3_HUMAN | SEQ ID NO.: 537 |
| PHX2A_HUMAN | SEQ ID NO.: 538 |
| EMX1_HUMAN | SEQ ID NO.: 539 |
| NC2B_HUMAN | SEQ ID NO.: 540 |
| DLX4_HUMAN | SEQ ID NO.: 541 |
| SRY_HUMAN | SEQ ID NO.: 542 |
| ZN777_HUMAN | SEQ ID NO.: 543 |
| NELL1_HUMAN | SEQ ID NO.: 544 |
| ZN398_HUMAN | SEQ ID NO.: 545 |
| GATA3_HUMAN | SEQ ID NO.: 546 |
| BSH_HUMAN | SEQ ID NO.: 547 |
| SF3B4_HUMAN | SEQ ID NO.: 548 |
| TEAD1_HUMAN | SEQ ID NO.: 549 |
| TEAD3_HUMAN | SEQ ID NO.: 550 |
| RGAP1_HUMAN | SEQ ID NO.: 551 |
| PHF1_HUMAN | SEQ ID NO.: 552 |
| FOXA1_HUMAN | SEQ ID NO.: 553 |
| GATA2_HUMAN | SEQ ID NO.: 554 |
| FOXO3_HUMAN | SEQ ID NO.: 555 |
| ZN212_HUMAN | SEQ ID NO.: 556 |
| IRX4_HUMAN | SEQ ID NO.: 557 |
| ZBED6_HUMAN | SEQ ID NO.: 558 |
| LHX4_HUMAN | SEQ ID NO.: 559 |
| SIN3A_HUMAN | SEQ ID NO.: 560 |
| RBBP7_HUMAN | SEQ ID NO.: 561 |
| NKX61_HUMAN | SEQ ID NO.: 562 |
| TRI68_HUMAN | SEQ ID NO.: 563 |
| R51A1_HUMAN | SEQ ID NO.: 564 |
| MB3L1_HUMAN | SEQ ID NO.: 565 |
| DLX5_HUMAN | SEQ ID NO.: 566 |
| NOTC1_HUMAN | SEQ ID NO.: 567 |
| TERF2_HUMAN | SEQ ID NO.: 568 |
| ZN282_HUMAN | SEQ ID NO.: 569 |
| RGS12_HUMAN | SEQ ID NO.: 570 |
| ZN840_HUMAN | SEQ ID NO.: 571 |
| SPI2B_HUMAN | SEQ ID NO.: 572 |
| PAX7_HUMAN | SEQ ID NO.: 573 |
| NKX62_HUMAN | SEQ ID NO.: 574 |
| ASXL2_HUMAN | SEQ ID NO.: 575 |
| FOXO1_HUMAN | SEQ ID NO.: 576 |
| GATA3_HUMAN | SEQ ID NO.: 577 |
| GATA1_HUMAN | SEQ ID NO.: 578 |
| ZMYM5_HUMAN | SEQ ID NO.: 579 |
| ZN783_HUMAN | SEQ ID NO.: 580 |
| SPI2B_HUMAN | SEQ ID NO.: 581 |
| LRP1_HUMAN | SEQ ID NO.: 582 |
| MIXL1_HUMAN | SEQ ID NO.: 583 |
| SGT1_HUMAN | SEQ ID NO.: 584 |
| LMCD1_HUMAN | SEQ ID NO.: 585 |
| CEBPA_HUMAN | SEQ ID NO.: 586 |
| GATA2_HUMAN | SEQ ID NO.: 587 |
| SOX14_HUMAN | SEQ ID NO.: 588 |
| WTIP_HUMAN | SEQ ID NO.: 589 |
| PRP19_HUMAN | SEQ ID NO.: 590 |
| CBX6_HUMAN | SEQ ID NO.: 591 |
| NKX11_HUMAN | SEQ ID NO.: 592 |
| RBBP4_HUMAN | SEQ ID NO.: 593 |
| DMRT2_HUMAN | SEQ ID NO.: 594 |
| SMCA2_HUMAN | SEO ID NO.: 595 |

[0343] In some embodiments, an effector domain comprises a functional domain that represses or silences gene expression, and the functional domain is a part of a larger protein, e.g., a zinc finger repressor protein. Functional domains that are capable of modulating gene expression, e.g., repress or increase gene expression can be identified from the larger protein with known methods and methods provided herein. For example, functional effector domains that can reduce or silence target gene expression may be identified based on sequences of repressor or activator proteins. Amino acid sequences of proteins having the function of modulating gene expression may be obtained from available genome browsers, such as UCSD genome browser or Ensembl genome browser. For example, a full length 573 amino acid sequence of the ZNF10 protein is provided in SEQ ID NO.: 596.

[0344] Protein annotation databases such as UniProt or Pfam can be used to identify functional domains within the full protein sequence. Using these tools, the repression domain can be identified within the ZNF10 protein sequence. In some instances, various functional domains identified from a larger protein may be tested. Databases may differ in the specific boundary domains. For example, in some embodiments, a repression domain derived from ZNF10 includes amino acids 14-85 of the above referenced ZNF10 sequence. In some embodiments, a repression domain derived from ZNF10 consists of amino acids 14-85 of the above referenced ZNF10 sequence. In some embodiments, a repression domain derived from ZNF10 includes amino acids 13-54 of the above referenced ZNF10 sequence. In some embodiments, a repression domain derived from ZNF10 consists of amino acids 13-54 of the above referenced ZNF10 sequence. As a starting point, the largest sequence, encompassing all regions identified by different databases, may be tested for gene expression modulation activity, for example, a region of the ZN10 protein comprising amino acids 13-85 is tested as a starting point. In further embodiments, the starting point region may be truncated by 1, 2, 3, 4, 5, 6, 7, 8, 9, 10, 11, 12, 13, 14, 15, 16, 17, 18, 19, 20, 21, 22, 23, 24, 25, 26, 27, 28, 29, 30, 31, 32, 33, 34, 35, 36, 37, 38, 39, 40, 41, 42, 43, 44, 45, 46, 47, 48, 49, 50 or more amino acids at the N-terminus or C-terminus and various truncations may be tested to identify the minimal functional unit.

[0345] In some embodiments, the effector domain comprises a histone deacetylase protein domain. In some embodiments, the effector domain comprises a HDAC family protein domain, for example, a HDAC1, HDAC3, HDAC5, HDAC7, or HDAC9 protein domain. In some embodiments, the effector domain removes the acetyl group. In some embodiments, the effector domain comprises a nucleosome remodeling domain. In some embodiments, the effector domain comprises a nucleosome remodeling and deacetylase complex (NURD), which removes acetyl groups from histones.

[0346] In some embodiments, the effector domain comprises a Tripartite motif containing 28 (TRIM28, TIF1-beta, or KAP1) protein. In some embodiments, the effector domain comprises one or more KAP1 protein. The KAP1 protein in an epigenetic editor may form a complex with one or more other effector domains of the epigenetic editor or one or more proteins involved in modulation of gene expression in a cellular environment. For example, KAP1 may be recruited by a KRAB domain of a transcriptional repressor. In some embodiments, KAP1 interacts with or recruits a histone deacetylase protein, a histone-lysine methyltransferase protein (e.g. depositing methyl groups on lysine 9 [K9] of a histone H3 tail [H3K9]), a chromatin remodeling protein, and/or a heterochromatin protein. In some embodiments, a KAP1 protein interacts with or recruits one or more protein complexes that reduces or silences gene expression. In some embodiments, a KAP1 protein interacts with or recruits a heterochromatin protein 1 (HP1) protein (e.g. via a chromoshadow domain of the HP1 protein), a SETDB1 protein, a HDAC protein, and/or a NuRD protein complex component. In some embodiments, a KAP1 protein recruits a CHD3 subunit of the nucleosome remodeling and deacetylation (NuRD) complex, thereby decreasing or silencing expression of a target gene. In some embodiments, a KAP1 protein recruits a SETDB1 protein (e.g. to a promoter region of a target gene), thereby decreasing or silencing expression of the target gene via H3K9 methylation associated with, e.g. the promoter region of the target gene. In some embodiments, recruitment of the SETDB1 protein results in heterochromatinization of a chromosome region harboring the target gene, thereby reducing or silencing expression of the target gene. In some embodiments, a KAP1 protein interacts with or recruits a HP1 protein, thereby decreasing or silencing expression of a target gene via reduced acetylation of H3K9 or H3K14 on histone tails associated with the target gene. Recruitment of SETDB1 induces heterochromatinization. In some embodiments, a KAP1 protein interacts with or recruits a ZFP90 protein (e.g. isoform 2 of ZFP90), and/or a FOXP3 protein.

[0347] Amino acid sequence of an exemplary KAP1 protein is provided in SEQ ID NO.: 597.

[0348] In some embodiments, the effector domain comprises a protein domain that interacts with or is recruited by one or more DNA epigenetic marks. For example, the effector domain may comprise a methyl CpG binding protein 2 (MECP2) protein that interacts with methylated DNA nucleotides in the target gene. In some embodiments, the MECP2 protein interacts with methylated DNA nucleotides in a CpG island of the target gene. In some embodiments, the MECP2 protein interacts with methylated DNA nucleotides not in a CpG island of the target gene. In some embodiments, the MECP2 protein in an epigenetic editor results in condensed chromatin structure, thereby reducing or silencing expression of the target gene. In some embodiments, the MECP2 protein in an epigenetic editor interacts with a histone deacetylase (e.g. HDAC), thereby repressing or silencing expression of the target gene. In some embodiments, the MECP2 protein in an epigenetic editor blocks access of a transcription factor or transcriptional activator to the target gene, thereby repressing or silencing expression of the target gene.

[0349] Amino acid sequence of an exemplary MECP2 protein is provided in SEQ ID NO.: 598.

[0350] In some embodiments, an effector domain comprises a chromoshadow domain, a ubiquitin-2 like Rad60 SUMO-like (Rad60-SLD/SUMO) domain, a chromatin organization modifier domain (Chromo) domain, a Yaf2/RYBP C-terminal binding motif domain (YAF2_RYBP), a CBX family C-terminal motif domain (CBX7_C), a Zinc finger C3HC4 type (RING finger) domain (zf-C3HC4_2), a Cytochrome b5 domain (Cyt-b5), a helix-loop-helix domain (HLH), a high mobility group box domain (HMG-box), a Sterile alpha motif domain (SAM_1), basic leucine zipper domain (bZIP_1), a Myb_DNA-binding domain, a Homeodomain, a MYM-type Zinc finger with FCS sequence domain (zf-FCS), a interferon regulatory factor 2-binding protein zinc finger domain (IRF-2BP1_2), a SSX repression domain (SSXRD), a B-box-type zinc finger domain (zf-B_box), a sterile alpha motif domain (SAM_2), a CXXC zinc finger domain (zf-CXXC), a regulator of chromosome condensation 1 domain (RCC1), a SRC homology 3 domain (SH3_9), a sterile alpha motif/Pointed domain (SAM_PNT), a Vestigial/Tondu family domain (Vg_Tdu), a LIM domain, a RNA recognition motif domain (RRM_1), a basic leucine zipper domain (bZIP 2), a paired amphipathic helix domain (PAH), a proteasomal ATPase OB C-terminal domain (Prot_ATP ID_OB), a nervy homology 2 domain (NHR2), a helix-hairpin-helix motif domain (HHH 3), a hinge domain of cleavage stimulation factor subunit 2 (CSTF2 hinge), a PPAR gamma N-terminal region domain (PPARgamma N), a CDC48 N-terminal domain (CDC48_2), a WD40 repeat domain (WD40), a Fip1 motif domain (Fip1), a PDZ domain (PDZ_6), a Von Willebrand factor type C domain (VWC), aNAB conserved region 1 domain (NCD1), a Si RNA-binding domain (Si), a HNF3 C-terminal domain (HNF_C), a Tudor domain (Tudor 2), a histone-like transcription factor (CBF/NF-Y) and archaeal histone domain (CBFD_NFYB HMF), a Zinc finger protein domain (DUF3669), a EGF-like domain (cEGF), a GATA zinc finger domain (GATA), a TEA/ATTS domain (TEA), a phorbol esters/diacylglycerol binding domain (C1-1), polycomb-like MTF2 factor 2 domain (Mtf2_C), a transactivation domain of FOXO protein family (FOXO-TAD), a Homeobox KN domain (Homeobox KN), a BED zinc finger domain (zf-BED), a zinc finger of C3HC4-type RING domain (zf-C3HC4_4), a RAD51 interacting motif domain (RAD51_interact), a p55-binding region of a Methyl-CpG-binding domain protein MBD (MBDa), Notch domain, a Raf-like Ras-binding domain (RBD), a Spin/Ssty family domain (Spin-Ssty), a PHD finger domain (PHD_3), a Low-density lipoprotein receptor domain class A (Ldl_recept_a), a CS domain, a DM DNA binding domain, or a QLQ domain. In some embodiments, the effector domain is a protein domain comprising a YAF2_RYBP domain, or homeodomain or any combination thereof. In some embodiments, the homeodomain of the YAF2_RYBP domain is a PRD domain, a NKL domain, a HOXL domain, or a LIM domain. In some embodiments, the effector domain comprises a protein domain selected from a group consisting of SUMO3 domain, Chromo domain from M phase phosphoprotein 8 (MPP8), chromoshadow domain from Chromobox 1 (CBX1), and SAM_1/SPM domain from Scm Polycomb Group Protein Homolog 1 (SCMH1). In some embodiments, the effector domain comprises a HNF3 C-terminal domain (HNF_C). In some embodiments, the HNF_C domain is from FOXA1 or FOXA2. In some embodiments, the HNF_C domain comprises an EH1 (engrailed homology 1) motif. In some embodiments, the effector domain comprises an interferon regulatory factor 2-binding protein zinc finger domain (IRF-2BP1_2). In some embodiments, the effector domain comprises a Cyt-b5 domain from DNA repair factor HERC2 E3 ligase. In some embodiments, the effector domain comprises a variant SH3 domain (SH3_9) from Bridging Integrator 1 (BIN1). In some embodiments, the effector domain is HMG-box domain from transcription factor TOX or zf-C3HC4-2 RING finger domain from the polycomb component PCGF2. In some embodiment, the effector domain comprises a Chromodomain-helicase-DNA-binding protein 3 (CHD3). In some embodiments, the effector domain comprises a ZNF783 domain. In some embodiments, the effector domain comprises a YAF2_RYBP domain. In some embodiment, the YAF2_RYBP domain comprises a 32 amino acid Yaf2/RYBP C-terminal binding motif domain (32 AA RYBP).

[0351] In some embodiments, an effector domain makes an epigenetic modification at a target gene that activates expression of the target gene. In some embodiments, an effector domain modifies the chemical modification of DNA or histone residues associated with the DNA at a target gene harboring the target sequence, thereby activating or increasing expression of the target gene. In some embodiments, the effector domain comprises a DNA demethylase, a DNA dioxygenase, a DNA hydroxylase, or a histone demethylase domain.

[0352] In some embodiments, the effector domain comprises a DNA demethylase domain that removes a methyl group from DNA nucleotides, thereby increasing or activating expression of the target gene.

[0353] In some embodiments, the effector domain comprises a TET (ten-eleven translocation methylcytosine dioxygenase) family protein domain that demethylates cytosine in methylated form and thereby increases expression of a target gene. In some embodiments, the effector domain comprises a TET1, TET2, or TET3 protein domain or any combination thereof. In some embodiments, the effector domain comprises a TET1 domain. In some embodiments, the effector domain comprises a KDM family protein domain that demethylates lysines in DNA-associated histones, thereby increasing expression of the target gene.

[0354] Exemplary demethylase domains that may be part of an epigenetic effector domain are provided in Table 4 below.

TABLE 4
Exemplary demethylase sequences that may
be used in epigenetic effector domains

| Protein | Species | Protein Sequence |
|---|---|---|
| TET1 | Human | SEQ ID NO.: 599 |
| TET2 | Human | SEQ ID NO.: 600 |
| TET3 | Human | SEQ ID NO.: 601 |
| TDG | Human | SEQ ID NO.: 602 |
| ROS1 | Arabidopsis | SEQ ID NO.: 603 |
| DME | Arabidopsis | SEQ ID NO.: 604 |
| DML2 | Arabidopsis | SEQ ID NO.: 605 |
| DML3 | Arabidopsis | SEQ ID NO.: 606 |

[0355] The effector domain may activate expression of the target gene. In some embodiments, the effector domain comprises a protein domain that recruits one or more transcription activator domains. In some embodiments, the effector domain comprises a protein domain that recruits one or more transcription factors. In some embodiments, the effector domain comprises a transcription activator or a transcription factor domain. In some embodiments, the effector domain comprises a Herpes Simplex Virus Protein 16 (VP16) activation domain. In some embodiments, the effector domain comprises an activation domain comprising a tandem repeat of multiple VP16 activation domains. In some embodiments, the effector domain comprises four tandem copies of VP16, a VP64 activation domain. In some embodiments, the effector domain comprises a p65 activation domain of NFκB; an Epstein-Barr virus R transactivator (Rta) activation domain. In some embodiments, the effector domain comprises a fusion of multiple activators, e.g., a tripartite activator of the VP64, the p65, and the Rta activation domains, (a VPR activation domain).

[0356] In some embodiments, an effector domain comprises a transactivation domain of FOXO protein family (FOXO-TAD), a LMSTEN motif domain (LMSTEN) (“LMSTEN” disclosed as SEQ ID NO: 1163), a Transducer of regulated CREB activity C terminus domain (TORC_C), a QLQ domain, a Nuclear receptor coactivator domain (Nuc_rec_co-act), an Autophagy receptor zinc finger-C2H2 domain (Zn-C2H2-12), an Anaphase-promoting complex subunit 16 (ANAPC16), a Dpy-30 domain, a ANC1 homology domain (AHD), a Signal transducer and activator of transcription 2 C terminal (STAT2_C), a I-kappa-kinase-beta NEMO binding domain (IKKbetaNEMObind), a Early growth response N-terminal domain (DUF3446), a TFIIE beta subunit core domain (TFIIE_beta), a N-terminal domain of DPF2/REQ (Requiem N), a LNR domain (Notch), a Atypical Arm repeat (Arm 3), a Protein kinase C terminal domain (PKinase_C), WW domain, a SH3 domain (SH3_1), a Myb-like DNA-binding domain, a WD domain G-beta repeat (WD40), a PHD-finger (PHD), a RNA recognition motif domain (RRM_1), a GATA zinc finger domain (GATA), a Vps4 C terminal oligomerization domain (Vps4_C), or in any combination thereof. In some embodiments, the effector domain comprises a KRAB domain that activates expression of a target gene. For example the KRAB domain may be a ZNF473 KRAB domain, a ZFP28 KRAB domain, a ZNF496 KRAB domain, or a ZNF597 KRAB domain or any combination thereof. In some embodiments, the KRAB domain comprises a 41-amino-acid ZNF473 KRAB domain (41 AA ZNF473). In some embodiments, the effector domain comprises a FOXO-TAD domain, a LMSTEN domain (“LMSTEN” disclosed as SEQ ID NO: 1163), or a TORC_C domain. In some embodiment, the protein domain comprises a RNA polymerase 64 transcription mediator complex subunit 9 (Med9), TFIIE beta subunit core domain (TFIIED3), nuclear receptor coactivator 3 domain (NCOA3), transactivation domain of FOXO protein family (FOXO-TAD), LMSTEN motifdomain (“LMSTEN” disclosed as SEQ ID NO: 1163), early growth response N-terminal domain (DUF3446), QLQ domain, or Dpy-30 motif domain or any combination thereof. In some embodiment, the effector domain comprises a ZNF473 KRAB domain or a Med9 domain.

[0357] Exemplary domains that can activate or increase target gene expression are provided in Table 5 below.

TABLE 5
Exemplary protein domains that may be used in epigenetic
effector domains to increase target gene expression

| Protein | Species | Protein Sequence |
|---|---|---|
| VP16 | Herpes simplex virus type 1 (strain 17) | SEQ ID NO.: 607 |
| VP64 | Herpes simplex virus type 1 | SEQ ID NO.: 608 |
| VP160 | Herpes simplex virus type 1 | SEQ ID NO.: 609 |
| HIF1alpha | Human | SEQ ID NO.: 610 |
| CITED2 | Human | SEQ ID NO.: 611 |
| Stat3 | Human | SEQ ID NO.: 612 |
| p65 | Human | SEQ ID NO.: 613 |
| p53 | Human | SEQ ID NO.: 614 |
| ZNF473 | Human | SEQ ID NO.: 615 |
| FOXO1 | Human | SEQ ID NO.: 616 |
| Myb | Human | SEQ ID NO.: 617 |
| CRTC1 | Human | SEQ ID NO.: 618 |
| Med9 | Human | SEQ ID NO.: 619 |
| EGR3 | Human | SEQ ID NO.: 620 |
| SMARCA2 | Human | SEQ ID NO.: 621 |
| Dpy-30 | Human | SEQ ID NO.: 622 |
| NCOA3 | Human | SEQ ID NO.: 623 |
| ZFP28 | Human | SEQ ID NO.: 624 |
| ZNF496 | Human | SEQ ID NO.: 625 |
| ZNF597 | Human | SEQ ID NO.: 626 |
| HSF1 | Human | SEQ ID NO.: 627 |
| RTA | Epstein-barr virus (strain B95-8) | SEQ ID NO.: 628 |

[0358] Additional exemplary domains that can activate or increase target gene expression are provided in Table 6 below.

TABLE 6
Exemplary protein domains that may be used in epigenetic
effector domains to increase target gene expression

| Gene name | Extended Domain sequence |
|---|---|
| ABL1_HUMAN | SEQ ID NO.: 629 |
| AF9_HUMAN | SEQ ID NO.: 630 |
| ANM2_HUMAN | SEQ ID NO.: 631 |
| APBB1_HUMAN | SEQ ID NO.: 632 |
| APC16_HUMAN | SEQ ID NO.: 633 |
| BTK_HUMAN | SEQ ID NO.: 634 |
| CACO1_HUMAN | SEQ ID NO.: 635 |
| CRTC2_HUMAN | SEQ ID NO.: 636 |
| CRTC3_HUMAN | SEQ ID NO.: 637 |
| CXXC1_HUMAN | SEQ ID NO.: 638 |
| DPF1_HUMAN | SEQ ID NO.: 639 |
| DPY30_HUMAN | SEQ ID NO.: 640 |
| EGR3_HUMAN | SEQ ID NO.: 641 |
| ENL_HUMAN | SEQ ID NO.: 642 |
| FIGN_HUMAN | SEQ ID NO.: 643 |
| FOXO1_HUMAN | SEQ ID NO.: 644 |
| FOXO3_HUMAN | SEQ ID NO.: 645 |
| IKKA_HUMAN | SEQ ID NO.: 646 |
| IMA5_HUMAN | SEQ ID NO.: 647 |
| ITCH_HUMAN | SEQ ID NO.: 648 |
| KIBRA_HUMAN | SEQ ID NO.: 649 |
| KPCI_HUMAN | SEQ ID NO.: 650 |
| KS6B2_HUMAN | SEQ ID NO.: 651 |
| MTA3_HUMAN | SEQ ID NO.: 652 |
| MYB_HUMAN | SEQ ID NO.: 653 |
| MYBA_HUMAN | SEQ ID NO.: 654 |
| NCOA2_HUMAN | SEQ ID NO.: 655 |
| NCOA3_HUMAN | SEQ ID NO.: 656 |
| NOTC1_HUMAN | SEQ ID NO.: 657 |
| NOTC1_HUMAN | SEQ ID NO.: 658 |
| NOTC2_HUMAN | SEQ ID NO.: 659 |
| PRP19_HUMAN | SEQ ID NO.: 660 |
| PYGO1_HUMAN | SEQ ID NO.: 661 |
| PYGO2_HUMAN | SEQ ID NO.: 662 |
| SAV1_HUMAN | SEQ ID NO.: 663 |
| SMCA2_HUMAN | SEQ ID NO.: 664 |
| SMRC2_HUMAN | SEQ ID NO.: 665 |
| STAT2_HUMAN | SEQ ID NO.: 666 |
| T2EB_HUMAN | SEQ ID NO.: 667 |
| U2AF4_HUMAN | SEQ ID NO.: 668 |
| WBP4_HUMAN | SEQ ID NO.: 669 |
| WWP1_HUMAN | SEQ ID NO.: 670 |
| WWP2_HUMAN | SEQ ID NO.: 671 |
| WWTR1_HUMAN | SEQ ID NO.: 672 |
| ZFP28_HUMAN | SEQ ID NO.: 673 |
| ZN473_HUMAN | SEQ ID NO.: 674 |
| ZN496_HUMAN | SEQ ID NO.: 675 |
| ZN597_HUMAN | SEQ ID NO.: 676 |

[0359] In some embodiments, an effector domain regulates acetylation of a histone associated with the target gene. In some embodiments, the effector domain comprises a histone acetyltransferase domain. In some embodiments, the effector domain comprises a protein domain that interacts with a histone acetyltransferase domain to effect histone acetylation. In some embodiments, the effector domain comprises a histone acetyltransferase 1 (HAT1) domain. In some embodiments, the effector domain comprises a histone acetyltransferase (HAT) core domain of the human E1A-associated protein p300. In some embodiments, the effector domain comprises a CBP/p300 histone acetyltransferase or a catalytic domain thereof. In some embodiments, the effector domain comprises a CREBBP, GCN4, GCN5, SAGA, SALSA, HAP2, HAP3, HAP4, PCAF, KMT2A, or any combination thereof.

[0360] Sequences of exemplary histone acetyltransferase domains are provided below: Exemplary p300 amino acid sequence: SEQ ID NO.: 677.

[0361] Exemplary CREBBP amino acid sequence: SEQ ID NO.: 678.

[0362] In some embodiments, an epigenetic editor described herein alters chemical modification of a target gene that harbors the target sequence. For example, an epigenetic editor comprising a methyltransferase domain can methylate the DNA or histone residues of the target gene, at nucleotides (or histones) near the target sequence, or within 100, 200, 300, 400, 500, 600, 700, 800, 900, 1000, 1500, 2000, 2500, 3000 base pairs flanking the target sequence, thereby repress or silent expression of the target gene. An epigenetic editor comprising a DNA or histone demethylase can remove the methylation of the DNA or histone residues associated with or bound to the target gene, thereby activating or increasing expression of the target gene.

[0363] Chemical modifications mediated by an epigenetic editor may be near a target sequence of a target gene. For example, such modifications may occur within 50, 100, 200, 300, 400, 500, 600, 700, 800, 900, 1000 base pairs flanking the target sequence. In some embodiments, the chemical modification occurs within 50, 100, 200, 300, 400, 500, 600, 700, 800, 900, 1000 base pairs upstream of the 5′ end of the target sequence.

### Epigenetic Editors

[0364] Described herein are epigenetic editors for epigenetic modification and expression regulation of target genes. As used herein, an epigenetic editor can be any agent that binds a target polynucleotide and has epigenetic modulation activity. In some embodiments, the epigenetic editor binds the polynucleotide at a specific sequence using a DNA binding domain. In some embodiments, the epigenetic editor binds the polynucleotide at a specific sequence using a nucleic acid guided DNA binding protein. In some embodiments, the epigenetic editor comprises an effector domain capable of modulating epigenetic state of a nucleic acid sequence at or adjacent to the target polynucleotide. In some embodiments, the epigenetic editor is capable of depositing an epigenetic editing mark on a chromatin region, a nucleic acid sequence, or a histone amino acid residue, at or adjacent to the target polynucleotide. For example, the epigenetic editor can be capable of methylating, demethylating, acetylating, deacetylating, ubiquitinating or deubiquitinating a chromatin region, a nucleic acid sequence, or a histone amino acid residue, at or adjacent to the target polynucleotide. In some embodiments, the epigenetic editor is capable of recruiting one or more proteins or complexes involved in transcription regulation, for example, a transcription factor, a transcription activator, a transcription repressor, or an insulator to a chromatin region, a nucleic acid sequence, or a histone amino acid residue, at or adjacent to the target polynucleotide.

[0365] Epigenetic editors provided herein can comprise one or more effector domains as described. In some embodiments, an epigenetic editor comprises multiple effector domains. In some embodiments, an epigenetic editor comprises one effector domain. In some embodiments, the epigenetic editor comprises at least 2, 3, 4, 5, 6, 7, 8, 9, 10 or more effector domains. In some embodiments, the epigenetic editor comprises at least 2 effector domains, e.g., two repressor domains. In some embodiments, the epigenetic editor comprises at least 2 effector domains. In some embodiments, the epigenetic editor comprises two or more effector domains. In some embodiments, the two or more effector domains function synergistically to result in enhanced modulation of a target gene. For example, an epigenetic editor may comprise two effector domains, one of which induces histone deacetylation and the other results in DNA methylation of the target gene.

[0366] In some embodiments, an epigenetic editor comprises a DNA methylation domain and a histone deacetylation domain. In some embodiments, an epigenetic editor comprises a DNA methylation domain and a repression domain that recruits additional DNA methylation, histone methylation, or histone deacetylation proteins. In some embodiments, an epigenetic editor comprises a DNA methylation domain and a scaffold protein that recruits additional DNA methylation, histone methylation, or histone deacetylation proteins. In some embodiments, an epigenetic editor comprises a DNA methylation domain, a histone deacetylation domain, and a scaffold protein that recruits additional DNA methylation, histone methylation, or histone deacetylation proteins. In some embodiments, an epigenetic editor comprises two or more DNA methylation domains, a histone deacetylation domain, and a scaffold protein that recruits additional DNA methylation, histone methylation, or histone deacetylation proteins. In some embodiments, an epigenetic editor comprises two or more DNA methylation domains, two or more histone deacetylation domains, and/or two or more scaffold proteins that recruits additional DNA methylation, histone methylation, or histone deacetylation proteins. In some embodiments, the epigenetic editor comprises a KRAB domain and a DNMT3 domain, both of which may synergistically effect enhanced reduction or silencing of expression of a target gene, as compared to an epigenetic effector having only one of the two repressor domains. In some embodiments, the epigenetic editor comprises a KRAB domain, a Dnmt3A domain, and a Dnmt3L domain. In some embodiments, the epigenetic editor comprises the configuration of a DNA binding domain flanked by a KRAB domain and a Dnmt3A-Dnmt3L fusion protein domain. In some embodiments, the epigenetic editor comprises the following configuration: N-[KRAB]-[DNA binding domain]-[Dnmt3A-Dnmt3L]-C, where “]-[” is any nuclear localization signal, any tag sequence, or any linker as provided herein.

[0367] In some embodiments, an epigenetic editor comprises a DNA demethylation domain and a histone acetylation domain. In some embodiments, an epigenetic editor comprises a DNA demethylation domain and an activation domain that recruits additional DNA demethylation or histone acetylation proteins. In some embodiments, an epigenetic editor comprises a DNA demethylation domain, a histone acetylation domain, and a scaffold protein that recruits additional DNA demethylation or histone acetylation proteins. In some embodiments, an epigenetic editor comprises two or more DNA demethylation domains, two or more histone acetylation domains, and/or two or more scaffold proteins that recruits additional DNA demethylation or histone deacetylation proteins.

[0368] In some embodiments, an epigenetic editor may comprise a VP64 activation domain, a p65 activation domain, and a Rta activation domains (together, a VPR activation domain), all of which synergistically effect enhanced activation of expression of a target gene, as compared to an epigenetic effector having only one of the three activation domains.

[0369] An effector domain of an epigenetic editor can be linked to another effector domain via direct fusion, or via any linker as described herein. An effector domain and a DNA binding domain of the epigenetic editor can also be linked via direct fusion or any linker as described herein.

[0370] In some embodiments, the two or more effector domains are identical. In some embodiments, the two or more effector domains belong to the same protein family. In some embodiments, the two or more effector domains are different proteins involved in the same transcriptional machinery or regulatory mechanism.

[0371] Multiple epigenetic editors, e.g. epigenetic editor fusion proteins or complexes may be used to effect activation or repression of a target gene or multiple target genes. For example, an epigenetic editor fusion protein comprising a DNA binding domain (e.g. dCas9 domain) and a methylation domain may be co-delivered with two or more guide RNAs, each targeting a different target DNA sequence. The two or more target DNA sequences may be in the same target gene, or may be in different target genes. The two or more target DNA sequences recognized by the DNA-binding domain may be overlapping or non-overlapping. The target sites for two of the DNA-binding domains may be separated by, for example, about 100 base pairs, about 200 base pairs, about 300 base pairs, about 400 base pairs, about 500 base pairs, about 600 or more base pairs. In addition, when targeting double-stranded DNA, such as an endogenous genome, the DNA-binding domains of the artificial transcription factors may target the same or different strands (one or more to positive strand and/or one or more to negative strand). Further, the same or different DNA-binding domains may be used in the epigenetic editors described herein.

### Linkers

[0372] Epigenetic editors provided herein may comprise one or more linkers that connect one or more components of the epigenetic editors. A linker may be a covalent bond or a polymeric linker with many atoms in length. A linker may be a peptide linker or a non-peptide linker.

[0373] In certain embodiments, linkers may be used to link any of the peptides or peptide domains of the epigenetic editor. The linker may be as simple as a covalent bond, or it may be a polymeric linker many atoms in length. In certain embodiments, the linker is a polypeptide or based on amino acids. In other embodiments, the linker is not peptide-like. In certain embodiments, the linker is a covalent bond (e.g., a carbon-carbon bond, disulfide bond, carbon-heteroatom bond, etc.). In certain embodiments, the linker is a carbon-nitrogen bond of an amide linkage. In certain embodiments, the linker is a cyclic or acyclic, substituted or unsubstituted, branched or unbranched aliphatic or heteroaliphatic linker. In certain embodiments, the linker is polymeric (e.g., polyethylene, polyethylene glycol, polyamide, polyester, etc.). In certain embodiments, the linker comprises a monomer, dimer, or polymer of aminoalkanoic acid. In certain embodiments, the linker comprises an aminoalkanoic acid (e.g., glycine, ethanoic acid, alanine, beta-alanine, 3-aminopropanoic acid, 4-aminobutanoic acid, 5-pentanoic acid, etc.). In certain embodiments, the linker comprises a monomer, dimer, or polymer of aminohexanoic acid (Ahx). In certain embodiments, the linker is based on a carbocyclic moiety (e.g., cyclopentane, cyclohexane). In other embodiments, the linker comprises a polyethylene glycol moiety (PEG). In other embodiments, the linker comprises amino acids. In certain embodiments, the linker comprises a peptide. In certain embodiments, the linker comprises an aryl or heteroaryl moiety. In certain embodiments, the linker is based on a phenyl ring. The linker may include functionalized moieties to facilitate attachment of a nucleophile (e.g., thiol, amino) from the peptide to the linker. Any electrophile may be used as part of the linker. Exemplary electrophiles include, but are not limited to, activated esters, activated amides, Michael acceptors, alkyl halides, aryl halides, acyl halides, and isothiocyanates.

[0374] In some embodiments, the linker is a non-peptide linker. For example, the linker may be a carbon bond, a disulfide bond, or carbon-heteroatom bond. In certain embodiments, the linker is a carbon-nitrogen bond of an amide linkage. In certain embodiments, the linker is a cyclic or acyclic, substituted or unsubstituted, branched or unbranched aliphatic or heteroaliphatic linker.

[0375] In certain embodiments, the linker is polymeric (e.g., polyethylene, polyethylene glycol, polyamide, polyester, etc.). In certain embodiments, the linker comprises a monomer, dimer, or polymer of aminoalkanoic acid. In certain embodiments, the linker comprises an aminoalkanoic acid (e.g., glycine, ethanoic acid, alanine, beta-alanine, 3-aminopropanoic acid, 4-aminobutanoic acid, 5-pentanoic acid, etc.). In certain embodiments, the linker comprises a monomer, dimer, or polymer of aminohexanoic acid (Ahx). In certain embodiments, the linker is based on a carbocyclic moiety (e.g., cyclopentane, cyclohexane). In other embodiments, the linker comprises a polyethylene glycol moiety (PEG). In other embodiments, the linker comprises amino acids. In certain embodiments, the linker comprises a peptide. In certain embodiments, the linker comprises an aryl or heteroaryl moiety. In certain embodiments, the linker is based on a phenyl ring. The linker may include functionalized moieties to facilitate attachment of a nucleophile (e.g., thiol, amino) from the peptide to the linker. Any electrophile may be used as part of the linker. Exemplary electrophiles include, but are not limited to, activated esters, activated amides, alkyl halides, aryl halides, acyl halides, and isothiocyanates.

[0376] In some embodiments, one or more linkers of an epigenetic editor provided herein is a peptide linker. For example, a zinc finger array and a repressor domain may be connected by a peptide linker, forming a zinc finger-repressor fusion protein. A peptide linker can be any length applicable to the epigenetic editor fusion proteins described herein. In some embodiments, the linker can comprise a peptide between 1 and 200 amino acids. In some embodiments, a DNA binding domain, e.g., a zinc finger array and an effector domain are fused via a linker that comprises from 1 to 5, 1 to 10, 1 to 20, 1 to 30, 1 to 40, 1 to 50, 1 to 60, 1 to 80, 1 to 100, 1 to 150, 1 to 200, 5 to 10, 5 to 20, 5 to 30, 5 to 40, 5 to 60, 5 to 80, 5 to 100, 5 to 150, 5 to 200, 10 to 20, 10 to 30, 10 to 40, 10 to 50, 10 to 60, 10 to 80, 10 to 100, 10 to 150, 10 to 200, 20 to 30, 20 to 40, 20 to 50, 20 to 60, 20 to 80, 20 to 100, 20 to 150, 20 to 200, 30 to 40, 30 to 50, 30 to 60, 30 to 80, 30 to 100, 30 to 150, 30 to 200, 40 to 50, 40 to 60, 40 to 80, 40 to 100, 40 to 150, 40 to 200, 50 to 60 50 to 80, 50 to 100, 50 to 150, 50 to 200, 60 to 80, 60 to 100, 60 to 150, 60 to 200, 80 to 100, 80 to 150, 80 to 200, 100 to 150, 100 to 200, or 150 to 200 amino acids in length. Longer or shorter linkers are also contemplated. In some embodiments, the peptide linker is 4, 16, 32, or 104 amino acids in length. In some embodiments, the peptide linker is a flexible linker. In some embodiments, the peptide linker is a rigid linker.

[0377] In some embodiments, the peptide linker comprises the amino acid sequence of SEQ ID NO.: 679-683

[0378] In some embodiments, the peptide linker is a XTEN linker. In some embodiments, the peptide linker comprises the amino acid sequence SEQ ID NO.: 684. In some embodiments, the linker is 24 amino acids in length. In some embodiments, the linker comprises the amino acid sequence SEQ ID NO.: 685. In some embodiments, the linker is 40 amino acids in length. In some embodiments, the linker comprises the amino acid sequence SEQ ID NO.: 686. In some embodiments, the linker is 64 amino acids in length. In some embodiments, the linker comprises the amino acid sequence SEQ ID NO.: 687.

[0379] In some embodiments, the linker is 92 amino acids in length. In some embodiments, the linker comprises the amino acid sequence SEQ ID NO.: 688.

[0380] Various linker lengths and flexibilities between a effector domain (e.g., a repressor domain) and a DNA binding protein (e.g., a Cas9 domain), between a effector domain and a second effector domain, or between any two components of an epigenetic editor can be employed (e.g., ranging from very flexible linkers of the form (GGGGS)n (SEQ ID NO: 1159), (GGGGS)n (SEQ ID NO: 1159), and (G)n to more rigid linkers of the form (EAAAK)n (SEQ ID NO: 1160), (SGGS)n (SEQ ID NO: 1161), and (XP)n) in order to achieve the optimal length for effector domain activity for the specific application. In some embodiments, n is any integer between 3 and 30. In some embodiments, n is 1, 2, 3, 4, 5, 6, 7, 8, 9, 10, 11, 12, 13, 14, or 15. In some embodiments, the linker comprises a (GGS)n motif, wherein n is 1, 3, or 7 (SEQ ID NO: 1164).

[0381] In some embodiments, a linker in an epigenetic editor comprises a nuclear localization signal, for example, of peptide sequence SEQ ID NO.: 689-694. In some embodiments, a linker in an epigenetic editor comprises a cleavable peptide, e.g., a T2A peptide, a p2A peptide, or a furin/p2A peptide. In some embodiments, a linker in an epigenetic editor comprises an expression tag, e.g. a detectable tag such as a green fluorescence protein.

[0382] In some embodiments, a linker comprises a nucleic acid. For example, one or more linkers of an epigenetic editor may include a nucleic acid that is capable of binding to, interacting with, associating with, or forming a complex with a polypeptide. In some embodiments, the nucleic acid linker may be a RNA linker capable of binding to and/or interacting with a RNA binding protein domain, e.g. a phase derived RNA binding domain. In some embodiments, the nucleic acid linker may be fused to a guide polynucleotide capable of binding to a Cas protein of an epigenetic editor. In some embodiments, the nucleic acid linker comprises a K homology (KH) domain binding sequence, a MS2 coat protein binding sequence, a PP7 coat protein binding sequence, a SfMu COM coat protein binding sequence, a telomerase Ku binding motif binding sequence, a sm7 protein binding sequence, or other RNA recognition motif binding sequence thereof.

[0383] In some embodiments, a linker comprises an affinity domain that specifically binds a component of an epigenetic effector. For example, an epigenetic effector may comprise a programmable DNA binding domain, a linker comprising an affinity domain having specific binding affinity to an epigenetic effector domain. The affinity domain may comprise an antibody, a single chain antibody, a nanobody, and antigen binding sequence, an antibody, a nanobody, a functional antibody fragment, a single chain variable fragment (scFv), an Fab, a single-domain antibody (sdAb), a VH domain, a VL domain, a VNAR domain, a VHH domain, a bispecific antibody, a diabody, or a functional fragment or a combination thereof. In some embodiments, an epigenetic effector domain comprises a programmable DNA binding domain and a KAP1 antibody which binds to a KAP1 protein. In some embodiments, an epigenetic effector domain comprises a programmable DNA binding domain and a KRAB antibody which binds to a KRAB protein. In some embodiments, an epigenetic effector domain comprises a programmable DNA binding domain and a DNMT1 antibody which binds to a DNMT1 protein. In some embodiments, an epigenetic effector domain comprises a programmable DNA binding domain and a DNMT3A antibody which binds to a DNMT3A protein. In some embodiments, an epigenetic effector domain comprises a programmable DNA binding domain and a DNMT3L antibody which binds to a DNMT3L protein. In some embodiments, an epigenetic effector domain comprises a programmable DNA binding domain and a ZIM3 antibody which binds to a ZIM3 protein. In some embodiments, an epigenetic effector domain comprises a programmable DNA binding domain and a TET1 antibody which binds to a TET1 protein. In some embodiments, an epigenetic effector domain comprises a programmable DNA binding domain and a VP16 or VP64 antibody which binds to a VP16 or VP64 protein.

[0384] In some embodiments, a linker comprises a repeat peptide array. In some embodiments, a linker comprises an epitope tag, for example, a SunTag. In some embodiments, an epigenetic editor comprises one or more peptide arrays comprising multiple copies of an epitope tag that can link multiple effector domains attached to or fused to peptide recognizing the epitope tag. For example, a epitope tag array can link a DNA binding domain and multiple effector domains or multiple copies of effector domains fused to or attached to antibody sequences recognizing the epitope tag. In some embodiments, an epigenetic editor comprises at least 1, 2, 3, 4, 5, 6, 7, 8, 9, 10 or more epitope tag repeats that link at least 1, 2, 3, 4, 5, 6, 7, 8, 9, 10 or more effector domains or copies of effector domains. In some embodiments, an epigenetic editor comprises multiple epitope tag repeats that link multiple effector domains and detectable expression tag domains, e.g. GFPs. In some embodiments, the repeat peptide array comprises gene control non-depressible 4 (GCN4) peptide sequences. In some embodiments, the repeat peptide arrays are further linked by linking peptide sequences of 15 to 50 amino acids. Repeat peptide arrays as described in US patent application No. US20170219596 and U.S. Pat. No. 10,612,044 are incorporated herein by reference in its entirety.

### Nuclear Localization Signals

[0385] In some embodiments, the epigenetic editors provided herein comprise one or more nuclear targeting sequences. For example, a zinc finger—repressor fusion protein described herein may further comprise one or more nuclear targeting sequences, for example, a nuclear localization sequence (NLS). In some embodiments, the fusion protein comprises multiple NLSs. In some embodiments, the fusion protein comprises a NLS at the N-terminus or the C-terminus of the fusion protein. In some embodiments, the fusion protein comprises a NLS at both the N-terminus and the C-terminus. In some embodiments, the NLS is embedded in the middle of the fusion protein. In some embodiments, a NLS comprises an amino acid sequence that facilitates the importation of a protein, that comprises an NLS, into the cell nucleus. In some embodiments, the NLS is fused to the N-terminus of the fusion protein. In some embodiments, the NLS is fused to the C-terminus of the fusion protein. In some embodiments, the NLS is fused to the N-terminus of the nucleic acid binding protein, e.g. the Cas9 or zinc finger array. In some embodiments, the NLS is fused to the C-terminus of the nucleic acid binding protein. In some embodiments, the NLS is fused to the N-terminus of a effector domain, e.g., a repressor domain. In some embodiments, the NLS is fused to the C-terminus of a effector domain, e.g., a repressor domain. In some embodiments, the NLS is fused to the fusion protein via one or more linkers. In some embodiments, the NLS is fused to the fusion protein without a linker. In some embodiments, the NLS comprises an amino acid sequence of any one of the NLS sequences provided or referenced herein. In some embodiments, a NLS comprises the amino acid sequence SEQ ID NO.: 687 or SEQ ID NO.: 692. Additional nuclear localization sequences are known in the art and would be apparent to the skilled artisan.

### Tags

[0386] Epigenetic editors provided herein may comprise one or more additional sequences domains, tags, for tracking, detection, and localization of the editors. In some embodiments, an epigenetic editor comprises one or more detectable tags. In some embodiments, the epigenetic editor comprises 1, 2, 3, 4, 5, 6, 7, 8, 9, 10 or more detectable tags. Each of the detectable tags may be same or different.

[0387] For example, an epigenetic editor fusion protein may comprise cytoplasmic localization sequences, export sequences, such as nuclear export sequences, or other localization sequences, as well as sequence tags that are useful for solubilization, purification, or detection of the fusion proteins. Suitable protein tags provided herein include, but are not limited to, biotin carboxylase carrier protein (BCCP) tags, myc-tags, calmodulin-tags, FLAG-tags, hemagglutinin (HA)-tags, polyhistidine tags, also referred to as histidine tags or His-tags, maltose binding protein (MBP)-tags, nus-tags, glutathione-S-transferase (GST)-tags, green fluorescent protein (GFP)-tags, thioredoxin-tags, S-tags, Softags (e.g., Softag 1, Softag 3), strep-tags, biotin ligase tags, FlAsH tags, V5 tags, and SBP-tags. Additional suitable sequences will be apparent to those of skill in the art.

[0388] In some embodiments, an epigenetic editor comprises from 1 to 2 detectable tags. In aspects, the fusion protein comprises 1 detectable tag. In aspects, the fusion protein comprises 2 detectable tags. In aspects, the fusion protein comprises 3 detectable tags. In aspects, the fusion protein comprises 4 detectable tags. In aspects, the fusion protein comprises 5 detectable tags.

### Epigenetic Editor Structure

[0389] The multiple components of epigenetic editors described herein may be in any order. In some embodiments, an epigenetic editor comprises the structure: N′]-[D1]-[D2]-[C′, wherein any one of D1 and D2 is a DNA binding domain or an effector domain.

[0390] In some embodiments, an epigenetic editor comprises the structure: N′]-[D1]-[D2]-[D3]-[C′, wherein any one of D1, D2, and D3 is a DNA binding domain, or an effector domain. In some embodiments, D1 is a DNA binding domain. In some embodiments, D2 is a DNA binding domain. In some embodiments, D3 is a DNA binding domain. In some embodiments, D1 is the only DNA binding domain. In some embodiments, D2 is the only DNA binding domain. In some embodiments, D3 is the only DNA binding domain.

[0391] In some embodiments, an epigenetic editor comprises the structure: N′]-[D1]-[D2]-[D3]-[D4]-[C′, wherein any one of D1, D2, D3, and D4 is a DNA binding domain, or an effector domain. In some embodiments, D1 is a DNA binding domain. In some embodiments, D2 is a DNA binding domain. In some embodiments, D3 is a DNA binding domain. In some embodiments, D4 is a DNA binding domain. In some embodiments, D1 is the only DNA binding domain. In some embodiments, D2 is the only DNA binding domain. In some embodiments, D3 is the only DNA binding domain. In some embodiments, D4 is the only DNA binding domain.

[0392] In some embodiments, an epigenetic editor comprises the structure: N′]-[D1]-[D2]-[D3]-[D4]-[D5]-[C′, wherein any one of D1, D2, D3, D4, and D5 is a DNA binding domain, or an effector domain. In some embodiments, D1 is a DNA binding domain. In some embodiments, D2 is a DNA binding domain. In some embodiments, D3 is a DNA binding domain. In some embodiments, D4 is a DNA binding domain. In some embodiments, D5 is a DNA binding domain. In some embodiments, D1 is the only DNA binding domain. In some embodiments, D2 is the only DNA binding domain. In some embodiments, D3 is the only DNA binding domain. In some embodiments, D4 is the only DNA binding domain. In some embodiments, D5 is the only DNA binding domain.

[0393] In some embodiments, the epigenetic editor comprises at least one effector domain that is a DNMT domain. In some embodiments, the epigenetic editor comprises at least one effector domain that is a KRAB domain. In some embodiments, the epigenetic effector comprises at least one effector domain that is a fusion of a DNMT3A-DNMT3L domain.

[0394] In some embodiments, the epigenetic editor comprises at least one effector domain that is a TET1 domain. In some embodiments, the epigenetic editor comprises at least one effector domain that is a VP16 domain. In some embodiments, the epigenetic editor comprises at least one effector domain that is a VP64 domain. In some embodiments, the epigenetic editor comprises at least one effector domain that is a RTA domain.

[0395] Components of an epigenetic editor may be structured in different configurations. For example, the DNA binding domain may be at the C terminus, the N terminus, or in between two or more epigenetic effector domains or additional domains. In some embodiments, the DNA binding domain is at the C terminus of the epigenetic editor. In some embodiments, the DNA binding domain is at the N terminus of the epigenetic editor. In some embodiments, the DNA binding domain is linked to one or more nuclear localization signals. In some embodiments, the DNA binding domain is linked to two or more nuclear localization signals. In some embodiments, the DNA binding domain is flanked by an epigenetic effector domain or an additional domain on both termini. In some embodiments, the epigenetic editor comprises the configuration of N′]-[epigenetic effector domain 1]-[DNA binding domain]-[epigenetic effector domain 2]-[C′. In some embodiments, the epigenetic editor comprises the configuration of N′]-[epigenetic effector domain 1]-[DNA binding domain]-[epigenetic effector domain 2]-[epigenetic effector domain 3]-[C′. In some embodiments, the epigenetic editor comprises the configuration of N′]-[epigenetic effector domain 1]-[epigenetic effector domain 2]-[DNA binding domain]-[epigenetic effector domain 3]-[C′. In some embodiments, the epigenetic editor comprises the configuration of N′]-[epigenetic effector domain 1]-[epigenetic effector domain 2]-[DNA binding domain]-[epigenetic effector domain 3]-[epigenetic effector domain 4]-[C′. In some embodiments, the epigenetic editor comprises the configuration of N′]-[KRAB]-[DNA binding domain]-[Dnmt3A]-[C′. In some embodiments, the epigenetic editor comprises the configuration of N′]-[KRAB]-[DNA binding domain]-[Dnmt3A]-[Dnmt3L]-[C′. In some embodiments, the epigenetic editor comprises the configuration of N′]-[SETDB1]-[DNA binding domain]-[Dnmt3A]-[Dnmt3L]-[C′. In some embodiments, the epigenetic editor comprises the configuration of N′]-[SETDB1]-[DNA binding domain]-[Dnmt3A]-[C′. In some embodiments, the epigenetic editor comprises the configuration of N′]-[KRAB]-[DNA binding domain]-[Dnmt3A-Dnmt3L]-[C′, wherein Dnmt3A and Dnmt3L are directly fused via a peptide bond.

[0396] In some embodiments, the epigenetic editor comprises the configuration of N′]-[Dnmt3A]-[DNA binding domain]-[KRAB]-[C′. In some embodiments, the epigenetic editor comprises the configuration of N′]-[Dnmt3A]-[Dnmt3L]-[DNA binding domain]-[KRAB]-[C′. In some embodiments, the epigenetic editor comprises the configuration of N′]-[Dnmt3A-Dnmt3L]-[DNA binding domain]-[KRAB]-[C′, wherein Dnmt3A and Dnmt3L are directly fused via a peptide bond. In some embodiments, the epigenetic editor comprises the configuration of N′]-[Dnmt3A]-[DNA binding domain]-[SETDB1]-[C′. In some embodiments, the epigenetic editor comprises the configuration of N′]-[Dnmt3A]-[Dnmt3L]-[DNA binding domain]-[SETDB1]-[C′. In some embodiments, the epigenetic editor comprises the configuration of N′]-[Dnmt3A-Dnmt3L]-[DNA binding domain]-[SETDB1]-[C′, wherein Dnmt3A and Dnmt3L are directly fused via a peptide bond. In some embodiments, a connecting structure “]-[” in any one of the epigenetic editor structures is a linker, e.g., a peptide linker. In some embodiments, a connecting structure “]-[” in any one of the epigenetic editor structures is a detectable tag. In some embodiments, a connecting structure “]-[” in any one of the epigenetic editor structures is a peptide bond. In some embodiments, a connecting structure “]-[” in any one of the epigenetic editor structures is a nuclear localization signal. In some embodiments, a connecting structure “]-[” in any one of the epigenetic editor structures is a promoter or a regulatory sequence. In an epigenetic editor structure, the multiple connecting structures “]-[” may be same or may each be a different linker, tag, NLS, or peptide bond.

[0397] The DNA binding domain (DBD) of an epigenetic editor may comprise any one of the DNA binding domains described herein or known to those skilled in the art. In some embodiments, the DBD comprises one or more zinc finger arrays. In some embodiments, the DBD comprises a TALE DNA binding domain. In some embodiments, the DBD is a RNA guided programmable DNA binding domain, e.g. a CRISPR-Cas protein domain. Suitable Cas proteins has been provided herein, including nuclease inactive Cas proteins for the purpose of epigenetic editing without causing target DNA strand breaks. A Cas protein in an epigenetic editor may be a nuclease inactive Cas9 (dCas9), a SaCas9d, a SpCas9d, a dCas9 with modified PAM specificity, a high-fidelity dCas9, a nuclease inactive Cpf1 (dCpf1), a dCpf1 with modified PAM specificity, a high-fidelity dCpf1, a dCas12e, a dCasY, or any other Cas protein as described herein.

[0398] In some embodiments, an epigenetic editor comprises a DNA binding domain (DBD) and an effector domain that represses or silences expression of a target gene. In some embodiments, the epigenetic editor comprises the configuration of N′]-[repression domain]-[DBD]-[-C′, wherein the connecting structure]-[is any one of the linkers as described herein, a detectable tag, an affinity domain, a peptide bond, a nuclear localization signal, a promoter, and/or a regulatory sequence. In some embodiments, the epigenetic editor comprises the configuration of N′]-[DBD]-[repression domain]-[-C′, wherein the connecting structure]-[is any one of the linkers as described herein, a detectable tag, an affinity domain, a peptide bond, a nuclear localization signal, a promoter, and/or a regulatory sequence.

[0399] In some embodiments, an epigenetic editor comprises a DNA binding domain (DBD) and a DNA methyltransferase domain that deposits one or more methylation marks at a target gene, thereby repressing or silencing expression of the target gene. In some embodiments, the epigenetic editor comprises the configuration of N′]-[DNA methyltransferase domain]-[DBD]-[-C′, wherein the connecting structure]-[is any one of the linkers as described herein, a detectable tag, an affinity domain, a peptide bond, a nuclear localization signal, a promoter, and/or a regulatory sequence. In some embodiments, the epigenetic editor comprises the configuration of N′]-[DBD]-[DNA methyltransferase domain]-[-C′, wherein the connecting structure ]-[is any one of the linkers as described herein, a detectable tag, an affinity domain, a peptide bond, a nuclear localization signal, a promoter, and/or a regulatory sequence.

[0400] In some embodiments, an epigenetic editor comprises a DNA binding domain (DBD), a DNA methyltransferase domain, and an effector domain that represses or silences expression of a target gene. In some embodiments, the epigenetic editor comprises the configuration of N′]-[DNA methyltransferase domain]-[DBD]-[repression domain]-[C′, wherein the connecting structure]-[is any one of the linkers as described herein, a detectable tag, an affinity domain, a peptide bond, a nuclear localization signal, a promoter, and/or a regulatory sequence. In some embodiments, the epigenetic editor comprises the configuration of N′]-[repression domain]-[DBD]-[DNA methyltransferase domain]-[C′, wherein the connecting structure]-[is any one of the linkers as described herein, a detectable tag, an affinity domain, a peptide bond, a nuclear localization signal, a promoter, and/or a regulatory sequence.

[0401] In some embodiments, the epigenetic editor comprises the configuration of N′]-[DNA methyltransferase domain]-[repression domain]-[DBD]-[C′, wherein the connecting structure]-[is any one of the linkers as described herein, a detectable tag, an affinity domain, a peptide bond, a nuclear localization signal, a promoter, and/or a regulatory sequence. In some embodiments, the epigenetic editor comprises the configuration of N′]-[repression domain]-[DNA methyltransferase domain]-[DBD]-[C′, wherein the connecting structure]-[is any one of the linkers as described herein, a detectable tag, an affinity domain, a peptide bond, a nuclear localization signal, a promoter, and/or a regulatory sequence.

[0402] The repression domain in an epigenetic editor may comprise any one of the expression repression proteins known to those skilled in the art and as described herein, or any homologs or combination thereof. In some embodiments, the repression domain comprises a histone deacetylase domain. In some embodiments, the repression domain interacts with a scaffold protein domain that recruits one or more protein domains that repress expression of the target gene. For example, the repression domain may recruit or interact with a scaffold protein domain that recruits a PRMT protein, a HDAC protein, a SETDB1 protein, or a NuRD protein domain. In some embodiments, the repression domain interacts with epigenetically marked DNA nucleotides in a target gene thereby repressing or silencing expression of the target gene. In some embodiments, the repression domain comprises a MECP2 domain. In some embodiments, the repression domain comprises a KAP1 domain. In some embodiments, the repression domain comprises any one of the domains of Table 2 or Table 3, or any combination or homologs thereof.

[0403] The DNA methyltransferase domain in an epigenetic editor may comprise any one of the DNA methyltransferase proteins known to those skilled in the art and as described herein, or any homologs or combination thereof. In some embodiments, the effector domain comprises a DNMT3 domain. In some embodiments, the DNA methyltransferase domain comprises a DNMT3A domain. In some embodiments, the DNA methyltransferase domain comprises a DNMT3B domain. In some embodiments, the DNA methyltransferase domain comprises a DNMT3C domain. In some embodiments, the DNA methyltransferase domain comprises a DNMT3L domain. In some embodiments, the DNA methyltransferase domain comprises a fusion of DNMT3A-DNMT3L domain. As described herein, the DNMT3A-DNMT3L fusion domain may be in either order, e.g., N-DNMT3A-DNMT3L-C, or N-DNMT3L-DNMT3A-C. In some embodiments, the DNA methyltransferase domain comprises any one of the domains of Table 1, or any combination or homologs thereof.

[0404] In some embodiments, an epigenetic editor comprises a DNA binding domain (DBD) and an effector domain that increases expression of a target gene. In some embodiments, the epigenetic editor comprises the configuration of N′]-[activation domain]-[DBD]-[C′, wherein the connecting structure]-[is any one of the linkers as described herein, a detectable tag, an affinity domain, a peptide bond, a nuclear localization signal, a promoter, and/or a regulatory sequence. In some embodiments, the epigenetic editor comprises the configuration of N′]-[DBD]-[activation domain]-[C′, wherein the connecting structure]-[is any one of the linkers as described herein, a detectable tag, an affinity domain, a peptide bond, a nuclear localization signal, a promoter, and/or a regulatory sequence.

[0405] In some embodiments, an epigenetic editor comprises a DNA binding domain (DBD) and a DNA demethylation domain that removes one or more methylation marks at a target gene, thereby increasing expression of the target gene. In some embodiments, the epigenetic editor comprises the configuration of N′]-[DNA demethylase domain]-[DBD]-[C′, wherein the connecting structure]-[is any one of the linkers as described herein, a detectable tag, an affinity domain, a peptide bond, a nuclear localization signal, a promoter, and/or a regulatory sequence. In some embodiments, the epigenetic editor comprises the configuration of N′]-[DBD]-[DNA demethylase domain]-[C′, wherein the connecting structure]-[is any one of the linkers as described herein, a detectable tag, an affinity domain, a peptide bond, a nuclear localization signal, a promoter, and/or a regulatory sequence.

[0406] In some embodiments, an epigenetic editor comprises a DNA binding domain (DBD), a DNA demethylase domain, and an activation effector domain that increases expression of a target gene. In some embodiments, the epigenetic editor comprises the configuration of N′]-[DNA demethylase domain]-[DBD]-[activation domain]-[C′, wherein the connecting structure]-[is any one of the linkers as described herein, a detectable tag, an affinity domain, a peptide bond, a nuclear localization signal, a promoter, and/or a regulatory sequence. In some embodiments, the epigenetic editor comprises the configuration of N′]-[activation domain]-[DBD]-[DNA demethylase domain]-[C′, wherein the connecting structure]-[is any one of the linkers as described herein, a detectable tag, an affinity domain, a peptide bond, a nuclear localization signal, a promoter, and/or a regulatory sequence.

[0407] In some embodiments, the epigenetic editor comprises the configuration of N′]-[DNA demethylase domain]-[activation domain]-[DBD]-[C′, wherein the connecting structure]-[is any one of the linkers as described herein, a detectable tag, an affinity domain, a peptide bond, a nuclear localization signal, a promoter, and/or a regulatory sequence. In some embodiments, the epigenetic editor comprises the configuration of N′]-[activation domain]-[DNA demethylase domain]-[DBD]-[C′, wherein the connecting structure]-[is any one of the linkers as described herein, a detectable tag, an affinity domain, a peptide bond, a nuclear localization signal, a promoter, and/or a regulatory sequence.

[0408] The activation domain in an epigenetic editor may comprise any one of the expression activation proteins known to those skilled in the art and as described herein, or any homologs or combination thereof. In some embodiments, the activation domain comprises a histone acetyltransferase domain. In some embodiments, the activation domain interacts with a scaffold protein domain that recruits one or more protein domains that activate expression of the target gene. For example, the activation domain may recruit or interact with a scaffold protein domain that recruits one or more transcription factors or activators. In some embodiments, the activation domain comprises a Herpes Simplex Virus Protein 16 (VP16) activation domain. In some embodiments, the activation domain comprises an activation domain comprising a tandem repeat of multiple VP16 activation domains. In some embodiments, the activation domain comprises four tandem copies of VP16, a VP64 activation domain. In some embodiments, the activation domain comprises eight tandem copies of VP16, a VP128 activation domain. In some embodiments, the activation domain comprises ten tandem copies of VP16, a VP160 activation domain. In some embodiments, the activation domain comprises p65 activation domain of NFκB. In some embodiments, the activation domain comprises an Epstein-Barr virus R transactivator (Rta) activation domain. In some embodiments, the activation domain comprises a fusion of multiple activators, e.g., a tripartite activator of the VP64, the p65, and the Rta activation domains, (a VPR activation domain). In some embodiments, the activation domain comprises any one of the domains of Table 5 or Table 6, or any homologs or combination thereof.

[0409] The DNA demethylation domain in an epigenetic editor may comprise any one of the DNA demethylation proteins known to those skilled in the art and as described herein, or any homologs or combination thereof. In some embodiments, the DNA demethylation domain comprises a TET family protein domain. In some embodiments, the DNA demethylation domain comprises a TET1, TET2, or TET3 protein domain. In some embodiments, the DNA demethylation domain comprises a TET1 protein domain. In some embodiments, the DNA demethylation domain comprises any one of the domains of Table 4, or any homologs or combination thereof.

[0410] In some embodiments, an epigenetic editor that can reduce or silence expression of a target gene comprises a Dnmt3A-Dnmt3L fusion protein domain. In some embodiments, the epigenetic editor further comprises a repression scaffold or recruiting protein domain, for example, a KRAB domain, a KAP1 domain, or a MECP2 domain. In some embodiments, the epigenetic editor comprises a Dnmt3A-Dnmt3L fusion domain and an additional repression domain that reduces or silences expression of a target gene. The repression domain in an epigenetic editor may comprise any one of the expression repression proteins known to those skilled in the art and as described herein, or any homologs or combination thereof. In some embodiments, the repression domain comprises a histone deacetylase domain. In some embodiments, the repression domain interacts with a scaffold protein domain that recruits one or more protein domains that repress expression of the target gene. For example, the repression domain may recruit or interact with a scaffold protein domain that recruits a PRMT protein, a HDAC protein, a SETDB1 protein, or a NuRD protein domain. In some embodiments, the repression domain interacts with epigenetically marked DNA nucleotides in a target gene thereby represses or silences expression of the target gene. In some embodiments, the repression domain comprises a MECP2 domain. In some embodiments, the repression domain comprises a KAP1 domain. In some embodiments, the repression domain comprises any one of the domains of Table 2 or Table 3, or any combination or homologs thereof.

[0411] In some embodiments, the epigenetic editor comprises a Dnmt3A-Dnmt3L fusion domain and a KAP1 domain. In some embodiments, the epigenetic editor comprises the following configuration: N]-[Dnmt3A-3L]-[KAP1]-[DBD]-[C, wherein the connecting structure]-[ may be any one of the linkers as provided herein. In some embodiments, the epigenetic editor comprises the following configuration: N]-[KAP1]-[Dnmt3A-3L]-[DBD]-[C, wherein the connecting structure]-[ may be any one of the linkers as provided herein. In some embodiments, the epigenetic editor comprises the following configuration: N]-[DBD]-[Dnmt3A-3L]-[KAP1]-[C, wherein the connecting structure]-[ may be any one of the linkers as provided herein. In some embodiments, the epigenetic editor comprises the following configuration: N]-[DBD]-[KAP1]-[Dnmt3A-3L]-[C, wherein the connecting structure]-[ may be any one of the linkers as provided herein. In some embodiments, the epigenetic editor comprises the following configuration: N]-[KAP1]-[DBD]-[Dnmt3A-3L]-[C, wherein the connecting structure]-[ may be any one of the linkers as provided herein. In some embodiments, the epigenetic editor comprises the following configuration: N]-[Dnmt3A-3L]-[DBD]-[KAP1]-[C, wherein the connecting structure]-[ may be any one of the linkers as provided herein.

[0412] In some embodiments, the epigenetic editor comprises a Dnmt3A-Dnmt3L fusion domain and a MECP2 domain. In some embodiments, the epigenetic editor comprises the following configuration: N]-[Dnmt3A-3L]-[MECP2]-[DBD]-[C, wherein the connecting structure]-[ may be any one of the linkers as provided herein. In some embodiments, the epigenetic editor comprises the following configuration: N]-[MECP2]-[Dnmt3A-3L]-[DBD]-[C, wherein the connecting structure]-[ may be any one of the linkers as provided herein. In some embodiments, the epigenetic editor comprises the following configuration: N]-[DBD]-[Dnmt3A-3L]-[MECP2]-[C, wherein the connecting structure]-[ may be any one of the linkers as provided herein. In some embodiments, the epigenetic editor comprises the following configuration: N]-[DBD]-[MECP2]-[Dnmt3A-3L]-[C, wherein the connecting structure]-[may be any one of the linkers as provided herein. In some embodiments, the epigenetic editor comprises the following configuration: N]-[MECP2]-[DBD]-[Dnmt3A-3L]-[C, wherein the connecting structure]-[ may be any one of the linkers as provided herein. In some embodiments, the epigenetic editor comprises the following configuration: N]-[Dnmt3A-3L]-[DBD]-[MECP2]-[C, wherein the connecting structure]-[ may be any one of the linkers as provided herein.

[0413] In some embodiments, the epigenetic editor comprises a Dnmt3A-Dnmt3L fusion domain and a heterochromatin protein 1 (HP1) domain. In some embodiments, the epigenetic editor comprises the following configuration: N]-[Dnmt3A-3L]-[HP1]-[DBD]-[C, wherein the connecting structure]-[ may be any one of the linkers as provided herein. In some embodiments, the epigenetic editor comprises the following configuration: N]-[HP1]-[Dnmt3A-3L]-[DBD]-[C, wherein the connecting structure]-[ may be any one of the linkers as provided herein. In some embodiments, the epigenetic editor comprises the following configuration: N]-[DBD]-[Dnmt3A-3L]-[HP1]-[C, wherein the connecting structure]-[ may be any one of the linkers as provided herein. In some embodiments, the epigenetic editor comprises the following configuration: N]-[DBD]-[HP1]-[Dnmt3A-3L]-[C, wherein the connecting structure]-[ may be any one of the linkers as provided herein. In some embodiments, the epigenetic editor comprises the following configuration: N]-[HP1]-[DBD]-[Dnmt3A-3L]-[C, wherein the connecting structure]-[ may be any one of the linkers as provided herein. In some embodiments, the epigenetic editor comprises the following configuration: N]-[Dnmt3A-3L]-[DBD]-[HP1]-[C, wherein the connecting structure]-[ may be any one of the linkers as provided herein.

[0414] In some embodiments, the epigenetic editor comprises a Dnmt3A-Dnmt3L fusion domain and a SETDB1 domain. In some embodiments, the epigenetic editor comprises the following configuration: N]-[Dnmt3A-3L]-[SETDB1]-[DBD]-[C, wherein the connecting structure]-[ may be any one of the linkers as provided herein. In some embodiments, the epigenetic editor comprises the following configuration: N]-[SETDB1]-[Dnmt3A-3L]-[DBD]-[C, wherein the connecting structure]-[ may be any one of the linkers as provided herein. In some embodiments, the epigenetic editor comprises the following configuration: N]-[DBD]-[Dnmt3A-3L]-[SETDB1]-[C, wherein the connecting structure]-[ may be any one of the linkers as provided herein. In some embodiments, the epigenetic editor comprises the following configuration: N]-[DBD]-[SETDB1]-[Dnmt3A-3L]-[C, wherein the connecting structure]-[may be any one of the linkers as provided herein. In some embodiments, the epigenetic editor comprises the following configuration: N]-[SETDB1]-[DBD]-[Dnmt3A-3L]-[C, wherein the connecting structure]-[ may be any one of the linkers as provided herein. In some embodiments, the epigenetic editor comprises the following configuration: N]-[Dnmt3A-3L]-[DBD]-[SETDB1]-[C, wherein the connecting structure]-[ may be any one of the linkers as provided herein.

[0415] In some embodiments, the epigenetic editor comprises a Dnmt3A-Dnmt3L fusion domain and a SETDB1 domain, a KAP1, domain, a KRAB domain, and/or a MECP2 domain, in any order and combination thereof.

[0416] In some embodiments, the epigenetic editor that reduces or silences expression of a target gene comprises a DBD and an affinity domain that specifically binds to a repression domain. For example, the epigenetic editor may comprise a DBD and a repression domain antibody. In some embodiments, the epigenetic editor comprises a DBD and a KAP1 affinity domain. In some embodiments, the epigenetic editor comprises a DBD and a KRAB affinity domain. In some embodiments, the epigenetic editor comprises a DBD and a SETDB1 affinity domain. In some embodiments, the epigenetic editor comprises a DBD and a MECP2 affinity domain. In some embodiments, the epigenetic editor comprises a DNA methyltransferase and a repression domain binding affinity domain. In some embodiments, the epigenetic editor comprises a Dnmt3A-Dnm3L fusion and a repression domain binding affinity domain. In some embodiments, the epigenetic editor comprises a Dnmt3A-Dnm3L fusion and KAP1 affinity domain. In some embodiments, the epigenetic editor comprises a Dnmt3A-Dnm3L fusion and KRAB affinity domain. In some embodiments, the epigenetic editor comprises a Dnmt3A-Dnm3L fusion and SETDB1 affinity domain. In some embodiments, the epigenetic editor comprises a Dnmt3A-Dnm3L fusion and MECP2 affinity domain. As used herein, an affinity domain may be an antibody, a single chain antibody, a nanobody, and antigen binding sequence, an antibody, a nanobody, a functional antibody fragment, a single chain variable fragment (scFv), an Fab, a single-domain antibody (sdAb), a VH domain, a VL domain, a VNAR domain, a VHH domain, a bispecific antibody, a diabody, or a functional fragment or a combination thereof.

[0417] In some embodiments, the epigenetic editor that reduces or silences expression of a target gene comprises a DBD and an affinity domain that specifically binds to a DNA methyltransferase domain. For example, the epigenetic editor may comprise a DBD and a DNA methyltransferase antibody. In some embodiments, the epigenetic editor comprises a DBD and a Dnmt3A affinity domain. In some embodiments, the epigenetic editor comprises a DBD and a Dnmt3L affinity domain. In some embodiments, the epigenetic editor comprises a repression domain and a DNA methyltransferase binding affinity domain. In some embodiments, the epigenetic editor comprises a repression domain and a Dnmt3A binding affinity domain. In some embodiments, the epigenetic editor comprises a repression domain and Dnmt3L affinity domain. In some embodiments, the epigenetic editor comprises one or more of a KAP1, a KRAB and a MECP2 domain, and a Dnmt3A binding affinity domain. In some embodiments, the epigenetic editor comprises one or more of a KAP1 domain, and a Dnmt3A binding affinity domain. In some embodiments, the epigenetic editor comprises one or more of a KAP1, a KRAB and a MECP2 domain, and a Dnmt3L binding affinity domain. In some embodiments, the epigenetic editor comprises one or more of a KAP1 domain, and a Dnmt3L binding affinity domain. The affinity domain may be an antibody, a single chain antibody, a nanobody, and antigen binding sequence, an antibody, a nanobody, a functional antibody fragment, a single chain variable fragment (scFv), an Fab, a single-domain antibody (sdAb), a VH domain, a VL domain, a VNAR domain, a VHH domain, a bispecific antibody, a diabody, or a functional fragment or a combination thereof.

[0418] In some embodiments, the epigenetic editor that reduces or silences expression of a target gene comprises a DBD and a first affinity domain that specifically binds to a DNA methyltransferase domain and a second affinity domain that specifically binds to a repression domain. For example, the epigenetic editor may comprise a DBD and a DNA methyltransferase antibody and a repression domain antibody. In some embodiments, the epigenetic editor comprises a DBD, a KAP1 affinity domain and a Dnmt3A affinity domain. In some embodiments, the epigenetic editor comprises a DBD, a KAP1 affinity domain and a Dnmt3L affinity domain. In some embodiments, the epigenetic editor comprises a DBD, a MECP2 affinity domain and a Dnmt3A affinity domain. In some embodiments, the epigenetic editor comprises a DBD, a MECP2 affinity domain and a Dnmt3L affinity domain. In some embodiments, the epigenetic editor comprises a DBD, a KRAB affinity domain and a Dnmt3A affinity domain. In some embodiments, the epigenetic editor comprises a DBD, a KRAB affinity domain and a Dnmt3L affinity domain. The affinity domain may be an antibody, a single chain antibody, a nanobody, and antigen binding sequence, an antibody, a nanobody, a functional antibody fragment, a single chain variable fragment (scFv), an Fab, a single-domain antibody (sdAb), a VH domain, a VL domain, a VNAR domain, a VHH domain, a bispecific antibody, a diabody, or a functional fragment or a combination thereof.

[0419] In some embodiments, an epigenetic editor that can increase expression of a target gene comprises a TET1 protein domain. In some embodiments, the epigenetic editor further comprises a activation protein domain, for example, a VP16 domain, a VP64 domain, a p65 domain or a Rta domain. In some embodiments, the epigenetic editor comprises a VP64-p65-Rta activation domains (a VPR activation domain) and a TET1 domain. In some embodiments, the epigenetic editor comprises the following configuration: N]-[TET1]-[VPR]-[DBD]-[C, wherein the connecting structure]-[ may be any one of the linkers as provided herein. In some embodiments, the epigenetic editor comprises the following configuration: N]-[VPR]-[TET1]-[DBD]-[C, wherein the connecting structure]-[ may be any one of the linkers as provided herein. In some embodiments, the epigenetic editor comprises the following configuration: N]-[DBD]-[TET1]-[VPR]-[C, wherein the connecting structure]-[ may be any one of the linkers as provided herein. In some embodiments, the epigenetic editor comprises the following configuration: N]-[DBD]-[VPR]-[TET1]-[C, wherein the connecting structure]-[ may be any one of the linkers as provided herein. In some embodiments, the epigenetic editor comprises the following configuration: N]-[VPR]-[DBD]-[TET1]-[C, wherein the connecting structure]-[may be any one of the linkers as provided herein. In some embodiments, the epigenetic editor comprises the following configuration: N]-[TET1]-[DBD]-[VPR]-[C, wherein the connecting structure]-[ may be any one of the linkers as provided herein, for example, a peptide linker, an array of epitope tags, or a scaffold nucleic acid (e.g. a RNA that recognizes a MS2 domain fused to the DBD, the TET, or the VPR domain).

[0420] In some embodiments, the epigenetic editor that increases expression of a target gene comprises a DBD and an affinity domain that specifically binds to an activation domain. For example, the epigenetic editor may comprise a DBD and an activation domain antibody. In some embodiments, the epigenetic editor comprises a DBD and a TET1 affinity domain. In some embodiments, the epigenetic editor comprises a DBD and a VP16 affinity domain. In some embodiments, the epigenetic editor comprises a DBD and a p65 affinity domain. In some embodiments, the epigenetic editor comprises a DBD and a Rta affinity domain. In some embodiments, the epigenetic editor comprises a DNA demethylase and an activation domain binding affinity domain. In some embodiments, the epigenetic editor comprises a activation domain and a demethylase affinity domain. In some embodiments, the epigenetic editor comprises a DBD and a TET1 affinity domain. In some embodiments, the epigenetic editor comprises a VP16 domain and a TET1 affinity domain. In some embodiments, the epigenetic editor comprises a VP64 domain and a TET1 affinity domain. In some embodiments, the epigenetic editor comprises a Rta domain and a TET1 affinity domain. In some embodiments, the epigenetic editor comprises a p65 domain and a TET1 affinity domain. In some embodiments, the epigenetic editor comprises a VPR activation domain and a TET1 affinity domain. The affinity domain may be an antibody, a single chain antibody, a nanobody, and antigen binding sequence, an antibody, a nanobody, a functional antibody fragment, a single chain variable fragment (scFv), an Fab, a single-domain antibody (sdAb), a VH domain, a VL domain, a VNAR domain, a VHH domain, a bispecific antibody, a diabody, or a functional fragment or a combination thereof.

### Additional Domains

[0421] An epigenetic editor system may further comprise an additional heterologous portion or domain (e.g., polynucleotide binding domain such as an RNA or DNA binding protein) that is capable of interacting with, associating with, or capable of forming a complex with a portion or segment (e.g., a polynucleotide motif) of a guide polynucleotide. In some embodiments, the additional heterologous portion or domain (e.g., polynucleotide binding domain such as an RNA or DNA binding protein) can be fused or linked to the DNA binding domain or an effector domain. In some embodiments, the additional heterologous portion may be capable of binding to, interacting with, associating with, or forming a complex with a polypeptide. In some embodiments, the additional heterologous portion may be capable of binding to, interacting with, associating with, or forming a complex with a polynucleotide. In some embodiments, the additional heterologous portion may be capable of binding to a guide polynucleotide. In some embodiments, the additional heterologous portion may be capable of binding to a polypeptide linker. In some embodiments, the additional heterologous portion may be capable of binding to a polynucleotide linker. The additional heterologous portion may be a protein domain. In some embodiments, the additional heterologous portion may be a K Homology (KH) domain, a MS2 coat protein domain, a PP7 coat protein domain, a SfMu Com coat protein domain, a sterile alpha motif, a telomerase Ku binding motif and Ku protein, a telomerase Sm7 binding motif and Sm7 protein, or any other RNA recognition motif.

### Target Sequences

[0422] As used herein, a “target polynucleotide sequence” may be a nucleic acid sequence present in a gene of interest. The target sequence may be in a genome of, or expressed in, a cell. In an aspect, epigenetic editors provided herein are used to bind target polynucleotide sequences and effect epigenetic modifications and/or transcription modulation of the target gene. For example, a target sequence may be recognized by a zinc finger array of an epigenetic editor, or may hybridize with a guide RNA sequence complexed with a nuclease inactive CRISPR protein of an epigenetic editor. In embodiments where the epigenetic editor comprises a gRNA-dCas-effector domain complex, the gRNA is designed to have complementarity to the target sequence (or identity to the opposing strand of the target sequence, e.g. the protospacer sequence). In some embodiments, the gRNA comprises a spacer sequence is 100% identical to a protospacer sequence in the target sequence. In some embodiments, the gRNA sequence comprises a spacer sequence that is about 95%, 90%, 85%, or 80% identical to a protospacer sequence in the target sequence.

[0423] In some embodiments, the target sequence is an endogenous sequence of an endogenous gene of a host cell. In some embodiments, the target sequence is an exogenous sequence.

[0424] The target sequence may be any region of the polynucleotide (e.g., DNA sequence) suitable for epigenetic editing. For example, the target polynucleotide sequence may be any part of a target gene. In some embodiments, the target polynucleotide sequence is part of a transcriptional regulatory sequence. In some embodiment, the target polynucleotide sequence is part of a promoter, enhancer or silencer. In some embodiments, the target polynucleotide sequence is part of a promoter. In some embodiments, the target polynucleotide sequence is part of an enhancer. In some embodiments, the target polynucleotide sequence is part of a silencer. In some embodiments, the target polynucleotide sequence is within about 3000, 2900, 2800, 2700, 2600, 2500, 2400, 2300, 2200, 2100, 2000, 1900, 1800, 1700, 1600, 1500, 1400, 1300, 1200, 1100, 1000, 900, 800, 700, 600, 500, 400, 300, 200, or 100 base pairs (bp) flanking a transcription start site. In some embodiments, the target polynucleotide sequence is within about 1000, 900, 800, 700, 600, 500, 400, 300, 200, or 100 base pairs (bp) flanking a transcription start site. In some embodiments, the target polynucleotide sequence is within about 500, 400, 300, 200, or 100 base pairs (bp) flanking a transcription start site.

[0425] In some embodiments, the target polynucleotide sequence is within about 100 base pairs (bp) flanking a transcription start site.

[0426] In some embodiments, the target polynucleotide sequence is a hypomethylated nucleic acid sequence. In some embodiments, the target polynucleotide sequence is a hypermethylated nucleic acid sequence. In some embodiments, the target polynucleotide sequence is at, near, or within a promoter sequence. In some embodiments, the target polynucleotide sequence is at, near, or within a promoter sequence. In aspects, the target polynucleotide sequence is adjacent to a CpG island. In aspects, the target polynucleotide sequence is known to be associated with a disease or condition.

### Modulation of Expression of Target Gene

[0427] In some embodiments, the disclosure provides epigenetic editor systems, compositions and methods for epigenetic modifications at a target polynucleotide in a target gene encoding a protein. In some embodiments, the epigenetic editor results in epigenetic modification, e.g. DNA methylation, in a coding region of the target gene, thereby reducing or silencing expression of the target gene. In some embodiments, the epigenetic editor results in epigenetic modification, e.g. DNA methylation, in a regulatory sequence such as a promoter or enhancer of the target gene, thereby reducing or silencing expression of the target gene. In some embodiments, the epigenetic editor results in transcription repression or recruits a transcription repressor to a coding region of the target gene, thereby reducing or silencing expression of the target gene. In some embodiments, the epigenetic editor recruits a transcription repressor to a regulatory sequence such as a promoter or enhancer of the target gene, thereby reducing or silencing expression of the target gene. In some embodiments, the epigenetic editor results in epigenetic modification, e.g. DNA demethylation, in a coding region of the target gene, thereby increasing expression of the target gene. In some embodiments, the epigenetic editor results in epigenetic modification, e.g. DNA demethylation, in a regulatory sequence such as a promoter or enhancer of the target gene, thereby increasing expression of the target gene. In some embodiments, the epigenetic editor results in transcription activation or recruits a transcription activator to a coding region of the target gene, thereby increasing expression of the target gene. In some embodiments, the epigenetic editor recruits a transcription activator to a regulatory sequence such as a promoter or enhancer of the target gene, thereby increasing expression of the target gene.

[0428] In some embodiments, the target gene and/or the protein encoded are associated with a disease, disorder, or pathogenic condition.

[0429] Epigenetic modifications effected by the epigenetic editors described herein are sequence specific. In some embodiments, the modification is at a specific site of the target polynucleotide. In some embodiments, the modification is at a specific allele of the target gene. Accordingly, the epigenetic modification may result in modulated expression, for example, reduced or increased expression, of one copy of a target gene harboring a specific allele, and not the other copy of the target gene. In some embodiments, the specific allele is associated with a disease, condition, or disorder.

[0430] Epigenetic modification may be made at any target genes of a genome of interest, for example, a prokaryote genome, a plant genome, mammalian or human genome. The target gene can be of or derived from any organism and genome thereof. For example, the target gene can be a prokaryotic gene, a eukaryotic gene, an animal gene, a plant gene, a mouse gene, a rat gene, a rabbit gene, a fish gene, an avian gene, a monkey gene, or a human gene. In some embodiments, the target gene is a reporter gene the expression of which can be readily tracked and monitored. Reporter genes and reporter systems include, for example, sequences encoding green fluorescence proteins, red fluorescence proteins, enhanced yellow or enhanced cyan proteins, or luciferase proteins. In some embodiments, the target gene encodes a selectable marker, for example, a beta-galactosidase, a Chloramphenicol acetyltransferase, or a antibiotic resistance marker. In some embodiments, the target gene is associated with, or harbors one or more mutations that are associated with a disease, condition, or disorder. Non-limiting exemplary target genes include HBB, HBA, hMSH2, HMLH1, growth factors GM-SCF, VEGF, EPO, Erb-B2, and hGH.

[0431] Target genes also include plant genes for which repression or activation leads to an improvement in plant characteristics, such as improved crop production, disease or herbicide resistance. For example, repression of expression of the FAD2-1 gene results in an advantageous increase in oleic acid and decrease in linoleic and linoleic acids.

[0432] In some embodiments, an epigenetic editor provided herein effects an epigenetic modification in a gene that harbors a target sequence. In some embodiments, the epigenetic editor modulates expression of a protein encoded by the gene. In some embodiments, the epigenetic editor reduces the level of a protein encoded by the gene. In some embodiments, the epigenetic editor increases the level of a protein encoded by the gene.

[0433] To generate epigenetic edits at a target gene, a target gene polynucleotide may be contacted with the epigenetic editing compositions disclosed herein comprising a target DNA binding domain, an epigenetic effector domain, e.g. an epigenetic repressor domain, wherein the DNA binding domain directs the epigenetic effector domain to a target polynucleotide sequence in the target gene, resulting in the epigenetic modification, e.g., a methylation state modification. In some embodiments, the epigenetic editor effects an alteration in the methylation state of a target DNA sequence in the target gene. In some embodiments, the epigenetic editor effects an alteration in the methylation state of a specific allele in the target gene. In some embodiments, the epigenetic editor effects an alteration in the methylation state of a histone protein associated with the target gene.

[0434] In some embodiments, the epigenetic modification reduces transcription of the target gene harboring the target sequence. In some embodiments, the epigenetic modification abolishes transcription of the target gene harboring the target sequence. In some embodiments, the epigenetic modification reduces transcription of a copy of the target gene harboring a specific allele recognized by the epigenetic editor. In some embodiments, the epigenetic modification abolishes transcription of a copy of the target gene harboring a specific allele recognized by the epigenetic editor. In some embodiments, the epigenetic editor reduces the level of a protein encoded by the target gene. In some embodiments, the epigenetic editor eliminates expression of a protein encoded by the target gene. In some embodiments, the epigenetic editor reduces the level of a protein encoded by a copy of the target gene harboring a specific allele recognized by the epigenetic editor. In some embodiments, the epigenetic editor eliminates expression of a protein encoded by a copy of the target gene harboring a specific allele recognized by the epigenetic editor.

[0435] In some embodiments, the epigenetic modification increases transcription of the target gene harboring the target sequence. In some embodiments, the epigenetic modification increases transcription of a copy of the target gene harboring a specific allele recognized by the epigenetic editor. In some embodiments, the epigenetic editor increases the level of a protein encoded by the target gene. In some embodiments, the epigenetic editor increases the level of a protein encoded by a copy of the target gene harboring a specific allele recognized by the epigenetic editor.

[0436] The target gene may be epigenetically modified in vitro, ex vivo, or in vivo. Accordingly, epigenetic modification of the target gene may modulate expression of a target gene, or an allele thereof, in a cell ex vivo or in a subject in vivo. In some embodiments, the target polynucleotide sequence is the gene locus in the genomic DNA of a cell. In some embodiments, the cell is a cultured cell. In some embodiments, the cell is in vitro. In some embodiments, the cell is ex vivo. In some embodiments, the cell is in vivo. For example, an epigenetic editor, e.g. a fusion protein comprising a zinc finger array and an effector domain, or a sgRNA complexed with a Cas protein-effector domain fusion, may be expressed in a cell where modulated expression of a target gene is desired to thereby allow contact of the target gene with the epigenetic editor described herein. In some embodiments, the cell is from a mammal. In some embodiments, the mammal is a human. In some embodiments, the mammal is a rodent. In some embodiments, the rodent is a mouse. In some embodiments, the rodent is a rat.

[0437] In some embodiments, the epigenetic editors described herein reduces expression of a target gene by at least about 20%, at least about 30%, at least about 40%, at least about 50%, at least about 60%, at least about 70%, at least about 80%, at least about 90%, at least about 95%, at least about 99%, or more, as measured by transcription of the target gene in a cell, a tissue, or a subject as compared to a control cell, control tissue, or a control subject. In some embodiments, the epigenetic editors described herein reduces expression of a copy of target gene by at least about 20%, at least about 30%, at least about 40%, at least about 50%, at least about 60%, at least about 70%, at least about 80%, at least about 90%, at least about 95%, at least about 99%, or more, as measured by transcription of the copy of the target gene in a cell, a tissue, or a subject as compared to a control cell, control tissue, or a control subject. In some embodiments, the copy of the target gene harbors a specific sequence or allele recognized by the epigenetic editor. In some embodiments, the epigenetically modified copy encodes a functional protein. Accordingly, in some embodiments, an epigenetic editor composition disclosed herein reduces or abolishes expression and/or function of protein encoded by a target gene, by reducing or abolishing expression of a functional protein encoded by the target gene. For example, the methods and composition disclosed herein may reduce expression and/or function of a protein encoded by the target gene by at least 3-fold, at least 4-fold, at least 5-fold, at least 6-fold, at least 7-fold, at least 8-fold, at least 9-fold, at least 10-fold, at least 11-fold, at least 12-fold, at least 13-fold, at least 14-fold, at least 15-fold, at least 20-fold, at least 25-fold, at least 30-fold, at least 35-fold, at least 40-fold, at least 45-fold, at least 50-fold, at least 60-fold, at least 70-fold, at least 80-fold, at least 90-fold, or at least 100 fold in a cell, a tissue, or a subject as compared to a control cell, control tissue, or a control subject.

[0438] In some embodiments, the epigenetic editors described herein increases expression of a target gene by at least about 20%, at least about 30%, at least about 40%, at least about 50%, at least about 60%, at least about 70%, at least about 80%, at least about 90%, at least about 95%, at least about 99%, at least 100%, at least 110%, at least 120%, at least 130%, at least 140%, at least 150%, at least 160%, at least 170%, at least 180%, at least 190%, at least 200%, at least 250%, at least 300%, at least 350%, at least 400%, at least 450%, at least 500% or more, as measured by transcription of the target gene in a cell, a tissue, or a subject as compared to a control cell, control tissue, or a control subject. In some embodiments, the epigenetic editors described herein increases expression of a copy of target gene by at least about 20%, at least about 30%, at least about 40%, at least about 50%, at least about 60%, at least about 70%, at least about 80%, at least about 90%, at least about 95%, at least about 99%, at least 100%, at least 110%, at least 120%, at least 130%, at least 140%, at least 150%, at least 160%, at least 170%, at least 180%, at least 190%, at least 200%, at least 250%, at least 300%, at least 350%, at least 400%, at least 450%, at least 500% or more, as measured by transcription of the copy of the target gene in a cell, a tissue, or a subject as compared to a control cell, control tissue, or a control subject. In some embodiments, the copy of the target gene harbors a specific sequence or allele recognized by the epigenetic editor. In some embodiments, the epigenetically modified copy encodes a functional protein. Accordingly, in some embodiments, an epigenetic editor composition disclosed herein increases expression and/or function of protein encoded by a target gene, by increasing expression of a functional protein encoded by the target gene. For example, the methods and composition disclosed herein may increase expression and/or function of a protein encoded by the target gene by at least 3-fold, at least 4-fold, at least 5-fold, at least 6-fold, at least 7-fold, at least 8-fold, at least 9-fold, at least 10-fold, at least 11-fold, at least 12-fold, at least 13-fold, at least 14-fold, at least 15-fold, at least 20-fold, at least 25-fold, at least 30-fold, at least 35-fold, at least 40-fold, at least 45-fold, at least 50-fold, at least 60-fold, at least 70-fold, at least 80-fold, at least 90-fold, or at least 100 fold in a cell, a tissue, or a subject as compared to a control cell, control tissue, or a control subject.

[0439] Methods for determining the expression level of a gene, for example the target of an epigenetic editor, are known in the art. For example, transcript level of a gene may be determined by reverse transcription PCR, quantitative RT-PCR, droplet digital PCR (ddPCR), Northern blot, RNA sequencing, DNA sequencing (e.g., sequencing of complementary deoxyribonucleic acid (cDNA) obtained from RNA); next generation (Next-Gen) sequencing, nanopore sequencing, pyrosequencing, or Nanostring sequencing. Protein level expressed from a gene may be determined by western blotting, enzyme linked immuno-absorbance assays, mass-spectrometry, immunohistochemistry, or flow cytometry analysis. Gene expression product levels may be normalized to an internal standard such as total messenger ribonucleic acid (mRNA) or the expression level of a particular gene, e.g., a house keeping gene.

[0440] In some embodiments, the effect of an epigenetic editor in modulating target gene expression may be examined using a reporter system. For example, an epigenetic editor may be designed to target a reporter gene encoding a reporter protein, e.g. a fluorescent protein. Expression of the reporter gene in such a model system may be monitored by, e.g., flow cytometry, fluorescence-activated cell sorting (FACS), or fluorescence microscopy. In some embodiments, a population of cells may be transfected with a vector which harbors a reporter gene. The vector may be constructed such that the reporter gene is expressed when the vector transfects a cell. Suitable reporter genes include genes encoding fluorescent proteins, for example green, yellow, cherry, cyan or orange fluorescent proteins. The population of cells carrying the reporter system may be transfected with DNA, mRNA, or vectors encoding the epigenetic editor targeting the reporter gene. The level of expression of the reporter gene may be quantified using a suitable technique, such as FACS.

[0441] Epigenetic editors described herein may be expressed in a host cell transiently, or may be integrated in a genome of the host cell. Both transiently expressed and integrated epigenetic editors can effect stable epigenetic modifications. For example, after introduction of an epigenetic editor comprising a DNA binding domain specific for a target gene and an epigenetic repression domain to a host cell, the target gene in the host cell may be stably or permanently repressed. In some embodiments, expression of the target gene is reduced for at least 1 week, at least 2 weeks, at least 3 weeks, at least 4 weeks, at least 5 weeks, at least 6 weeks, at least 7 weeks, at least 2 months, at least 3 months, at least 5 months, at least 6 months, at least 1 year, at least 2 years, or for the entire lifetime of the cell or the subject carrying the cell, as compared to the level of expression in the absence of the epigenetic editor. In some embodiments, expression of the target gene is silenced for at least 1 week, at least 2 weeks, at least 3 weeks, at least 4 weeks, at least 5 weeks, at least 6 weeks, at least 7 weeks, at least 2 months, at least 3 months, at least 5 months, at least 6 months, at least 1 year, at least 2 years, or for the entire lifetime of the cell or the subject carrying the cell as compared to the level of expression in the absence of the epigenetic editor. In some embodiments, after introduction of an epigenetic editor comprising a DNA binding domain specific for a target gene and an epigenetic activation domain to a host cell, the target gene in the host cell is stably or permanently activated. In some embodiments, expression of the target gene is increased for at least 1 week, at least 2 weeks, at least 3 weeks, at least 4 weeks, at least 5 weeks, at least 6 weeks, at least 7 weeks, at least 2 months, at least 3 months, at least 5 months, at least 6 months, at least 1 year, at least 2 years, or for the entire lifetime of the cell or the subject carrying the cell as compared to the level of expression in the absence of the epigenetic editor.

[0442] The epigenetic modification described herein may be inherited by the progeny of host cells that are contacted or introduced with an epigenetic editor. For example, in some embodiments, after introduction of an epigenetic editor comprising a DNA binding domain specific for a target gene and an epigenetic repression domain to a stem cell, e.g., a hematopoietic stem cell, expression of the target gene is also repressed in cells differentiated from the stem cell compared to cells differentiated from a control stem cell in the absence of the epigenetic editor. In some embodiments, expression of the target gene is silenced in cells differentiated from the stem cell. In some embodiments, after introduction of an epigenetic editor comprising a DNA binding domain specific for a target gene and an epigenetic activation domain to a stem cell, e.g., a hematopoietic stem cell, expression of the target gene is also increased in cells differentiated from the stem cell compared to cells differentiated from a control stem cell in the absence of the epigenetic editor.

[0443] Modulation of target gene expression can be assayed by determining any parameter that is indirectly or directly affected by the expression of the target gene. Such parameters include, e.g., changes in RNA or protein levels; changes in protein activity; changes in product levels; changes in downstream gene expression; changes in transcription or activity of reporter genes such as, for example, luciferase, CAT, beta-galactosidase, or GFP; changes in signal transduction; changes in phosphorylation and dephosphorylation; changes in receptor-ligand interactions; changes in concentrations of second messengers such as, for example, cGMP, cAMP, IP3, and Ca2+; changes in cell growth, changes in neovascularization, and/or changes in any functional effect of gene expression. Measurements can be made in vitro, in vivo, and/or ex vivo. Such functional effects can be measured by conventional methods, e.g., measurement of RNA or protein levels, measurement of RNA stability, and/or identification of downstream or reporter gene expression. Readout can be by way of, for example, chemiluminescence, fluorescence, colorimetric reactions, antibody binding, inducible markers, ligand binding assays; changes in intracellular second messengers such as cGMP and inositol triphosphate (IP3); changes in intracellular calcium levels; cytokine release, and the like.

[0444] To determine the level of gene expression modulation by a ZFP, cells contacted with ZFPs are compared to control cells, e.g., without the zinc finger protein or with a non-specific ZFP, to examine the extent of inhibition or activation. Control samples are assigned a relative gene expression activity value of 100%. Modulation/inhibition of gene expression is achieved when the gene expression activity value relative to the control is about 80%, preferably 50% (i.e., 0.5× the activity of the control), more preferably 25%, more preferably 5-0%. Modulation/activation of gene expression is achieved when the gene expression activity value relative to the control is 110%, more preferably 150% (i.e., 1.5× the activity of the control), more preferably 200-500%, more preferably 1000-2000% or more.

### Delivery

[0445] In an aspect, provided herein is a composition for gene expression modulation comprising the epigenetic editor as provided herein that generates epigenetic modifications at target genes. The epigenetic editor, or nucleic acid encoding the epigenetic editor or components thereof (e.g. nucleic acids encoding an epigenetic editor fusion protein comprising a zinc finger—repressor fusion, a Cas9-repressor fusion, and or nucleic acids encoding one or more guide RNAs) may be introduced to a cell via various ways known in the art. For example, in some embodiments, the epigenetic editor is delivered to a host cell or integrated into the genome of the host cell, or for transient expression in the host cell.

[0446] In some embodiments, the nucleic acid encoding the epigenetic editor or components thereof is operatively linked to a promoter and/or a regulatory sequence. The term “operably linked,” as used herein, means that the nucleotide sequence of interest is linked to regulatory sequence(s) in a manner that allows for expression of the nucleotide sequence. The term “regulatory sequence,” as used herein, includes, but is not limited to promoters, enhancers and other expression control elements. Such regulatory sequences are well known in the art and are described, for example, in Goeddel; Gene Expression Technology: Methods in Enzymology 185, Academic Press, San Diego, CA (1990).

[0447] In some embodiments, the composition further comprises a vector that comprises the nucleic acid sequence encoding an epigenetic editor protein. In some embodiments, the vector may be an expression vector. In some embodiments, the vector is a plasmid or a viral vector. The term “vector,” as used herein, refers to a nucleic acid molecule capable of transporting another nucleic acid to which it has been linked. In some examples, a vector is an expression vector that is capable of directing the expression of nucleic acids to which they are operatively linked. Examples of expression vectors include, but are not limited to, plasmid vectors, viral vectors based on vaccinia virus, poliovirus, adenovirus, adeno-associated virus, SV40, herpes simplex virus, human immunodeficiency virus, retrovirus (e.g., Murine Leukemia Virus, spleen necrosis virus, and vectors derived from retroviruses such as Rous Sarcoma Virus, Harvey Sarcoma Virus, avian leukosis virus, a lentivirus, human immunodeficiency virus, myeloproliferative sarcoma virus, and mammary tumor virus) and other recombinant vectors.

[0448] Non-viral delivery systems include but are not limited to DNA transfection methods. Here, transfection includes a process using a non-viral vector to deliver a gene to a target cell. Typical transfection methods include electroporation, DNA biolistics, lipid-mediated transfection, compacted DNA-mediated transfection, liposomes, immunoliposomes, lipofection, cationic agent-mediated transfection, cationic facial amphiphiles (CFAs).

[0449] In some embodiments, the epigenetic editor is delivered to a host cell for transient expression, e.g., via a transient expression vector. Transient expression of a epigenetic editor may result in prolonged or permanent epigenetic modification of the target gene. For example, the epigenetic modification may be stable for at least 1, 2, 3, 4, 5, 6, 7, 8, 9, 11, 12 weeks, 3, 4, 5, 6, 7, 8, 9, 10, 11, 12 months or more after introduction of the epigenetic editor into the host cell. The epigenetic modification may be maintained after one or more mitotic events of the host cell. The epigenetic modification may be maintained after one or more meiotic events of the host cell. In some embodiments, the epigenetic modification is maintained across generations in offspring generated or derived from the host cell.

[0450] In some embodiments, a nucleic acid sequence encoding an epigenetic editor or components thereof is a DNA, an RNA or mRNA, or a modified nucleic acid sequence. For example, a mRNA sequence encoding an epigenetic editor fusion protein may be chemically modified, or may comprise a 5′Cap, or one or more 3′ modifications.

[0451] Nucleic acids encoding epigenetic editors can be delivered directly to cells as naked DNA or RNA, for instance by means of transfection or electroporation, or can be conjugated to molecules (e.g., N-acetylgalactosamine) promoting uptake by the target cells. Nucleic acid vectors, such as the vectors can also be used. In particular embodiments, a polynucleotide, e.g. a mRNA encoding an epigenetic editor or a functional component thereof may be co-electroporated with a combination of multiple guide RNAs as described herein.

[0452] Nucleic acid vectors can comprise one or more sequences encoding a domain of a fusion protein or an epigenetic editor as described herein. A vector can also comprise a sequence encoding a signal peptide (e.g., for nuclear localization, nucleolar localization, or mitochondrial localization), associated with (e.g., inserted into or fused to) a sequence coding for a protein. As one example, a nucleic acid vectors can include a Cas9 coding sequence that includes one or more nuclear localization sequences (e.g., a nuclear localization sequence from SV40), and one or more effector domains such as repression domains.

[0453] In particular embodiments, a fusion protein, a protein domain, or a whole or a part of epigenetic editor components is encoded by a polynucleotide present in a viral vector (e.g., adeno-associated virus (AAV), AAV3, AAV3b, AAV4, AAV5, AAV6, AAV7, AAV8, AAV9, AAVrh8, AAV10, and variants thereof), or a suitable capsid protein of any viral vector. Thus, in some aspects, the disclosure relates to the viral delivery of a fusion protein. Examples of viral vectors include retroviral vectors (e.g. Maloney murine leukemia virus, MML-V), adenoviral vectors (e.g. AD100), lentiviral vectors (HIV and FIV-based vectors), herpesvirus vectors (e.g. HSV-2).

[0454] In some embodiments, an epigenetic editor protein is encoded by a polynucleotide present in an adeno-associated virus (AAV) vector. In some embodiments, the epigenetic editor protein comprises a zinc finger array in the DNA binding domain. Without wishing to be bound by any theory, epigenetic editors using zinc finger array instead of larger DNA binding domains such as Cas protein domains can be conveniently packed in viral vectors, e.g. AAV vector, given the small size of zinc fingers. In some embodiments, the polynucleotide encoding the epigenetic editor is of length of about 1000 bp, 1.1 kilobases (kb), 1.2 kb, 1.3 kb, 1.4 kb, 1.5 kb, 1.6 kb, 1.7 kb, 1.8 kb, 1.9 kb, 2.0 kb, 2.1 kb, 2.2 kb, 2.3 kb, 2.4 kb, 2.5 kb, 2.6 kb, 2.7 kb, 2.8 kb, 2.9 kb, 3.0 kb, 3.1 kb, 3.2 kb, 3.3 kb, 3.4 kb, 3.5 kb, 3.6 kb, 3.7 kb, 3.8 kb, 3.9 kb, 4.0 kb, or less. In some embodiments, The polynucleotide encoding the epigenetic editor is of length of about 2.0 kb, 2.1 kb, 2.2 kb, 2.3 kb, 2.4 kb, 2.5 kb, 2.6 kb, 2.7 kb, 2.8 kb, 2.9 kb, 3.0 kb, 3.1 kb, 3.2 kb, 3.3 kb, 3.4 kb, 3.5 kb, 3.6 kb, 3.7 kb, 3.8 kb, 3.9 kb, 4.0 kb, 4.1 kb, 4.2 kb, 4.3 kb, 4.4 kb, 4.5 kb, 4.6 kb, 4.7 kb, 4.8 kb, 4.9 kb, 5 kb or less.

[0455] Any AAV serotype, e.g., human AAV serotype, can be used including, but not limited to, AAV serotype 1 (AAV1), AAV serotype 2 (AAV2), AAV serotype 3 (AAV3), AAV serotype 4 (AAV4), AAV serotype 5 (AAV5), AAV serotype 6 (AAV6), AAV serotype 7 (AAV7), AAV serotype 8 (AAV8), AAV serotype 9 (AAV9), AAV serotype 10 (AAV10), AAV serotype 11 (AAV11), AAV serotype 11 (AAV11), a variant thereof, or a shuffled variant thereof (e.g., a chimeric variant thereof). In some embodiments, an AAV variant has at least 90%, e.g., 90%, 91%, 92%, 93%, 94%, 95%, 96%, 97%, 98%, 99% or more amino acid sequence identity to a wild-type AAV. An AAV1 variant can have at least 90%, e.g., 90%, 91%, 92%, 93%, 94%, 95%, 96%, 97%, 98%, 99% or more amino acid sequence identity to a wild-type AAV1. An AAV2 variant can have at least 90%, e.g., 90%, 91%, 92%, 93%, 94%, 95%, 96%, 97%, 98%, 99% or more amino acid sequence identity to a wild-type AAV2. An AAV3 variant can have at least 90%, e.g., 90%, 91%, 92%, 93%, 94%, 95%, 96%, 97%, 98%, 99% or more amino acid sequence identity to a wild-type AAV3. An AAV4 variant can have at least 90%, e.g., 90%, 91%, 92%, 93%, 94%, 95%, 96%, 97%, 98%, 99% or more amino acid sequence identity to a wild-type AAV4. An AAV5 variant can have at least 90%, e.g., 90%, 91%, 92%, 93%, 94%, 95%, 96%, 97%, 98%, 99% or more amino acid sequence identity to a wild-type AAV5. An AAV6 variant can have at least 90%, e.g., 90%, 91%, 92%, 93%, 94%, 95%, 96%, 97%, 98%, 99% or more amino acid sequence identity to a wild-type AAV6. An AAV7 variant can have at least 90%, e.g., 90%, 91%, 92%, 93%, 94%, 95%, 96%, 97%, 98%, 99% or more amino acid sequence identity to a wild-type AAV7. An AAV8 variant can have at least 90%, e.g., 90%, 91%, 92%, 93%, 94%, 95%, 96%, 97%, 98%, 99% or more amino acid sequence identity to a wild-type AAV8. An AAV9 variant can have at least 90%, e.g., 90%, 91%, 92%, 93%, 94%, 95%, 96%, 97%, 98%, 99% or more amino acid sequence identity to a wild-type AAV9. An AAV10 variant can have at least 90%, e.g., 90%, 91%, 92%, 93%, 94%, 95%, 96%, 97%, 98%, 99% or more amino acid sequence identity to a wild-type AAV10. An AAV11 variant can have at least 90%, e.g., 90%, 91%, 92%, 93%, 94%, 95%, 96%, 97%, 98%, 99% or more amino acid sequence identity to a wild-type AAV11. An AAV12 variant can have at least 90%, e.g., 90%, 91%, 92%, 93%, 94%, 95%, 96%, 97%, 98%, 99% or more amino acid sequence identity to a wild-type AAV12.

[0456] In some instances, one or more regions of at least two different AAV serotype viruses are shuffled and reassembled to generate an AAV chimera virus. For example, a chimeric AAV can comprise inverted terminal repeats (ITRs) that are of a heterologous serotype compared to the serotype of the capsid. The resulting chimeric AAV virus can have a different antigenic reactivity or recognition, compared to its parental serotypes. In some embodiments, a chimeric variant of an AAV includes amino acid sequences from 2, 3, 4, 5, or more different AAV serotypes.

[0457] Descriptions of AAV variants and methods for generating thereof are found, e.g., in Weitzman and Linden. Chapter 1-Adeno-Associated Virus Biology in Adeno-Associated Virus: Methods and Protocols Methods in Molecular Biology, vol. 807. Snyder and Moullier, eds., Springer, 2011; Potter et al., Molecular Therapy-Methods & Clinical Development, 2014, 1, 14034; Bartel et al., Gene Therapy, 2012, 19, 694-700; Ward and Walsh, Virology, 2009, 386(2):237-248; and Li et al., Mol Ther, 2008, 16(7):1252-1260, each incorporated herein by reference in its entirety. AAV virions (e.g., viral vectors or viral particle) described herein can be transduced into cells to introduce the epigenetic editor or any component thereof into the cell. An epigenetic editor can be packaged into an AAV viral vector according to any method known to those skilled in the art. Examples of useful methods are described in McClure et al., J Vis Exp, 2001, 57:3378.

[0458] A nucleic acid vector described herein can also include any suitable number of regulatory/control elements, e.g., promoters, enhancers, introns, polyadenylation signals, Kozak consensus sequences, or internal ribosome entry sites (IRES). These elements are well known in the art.

[0459] Nucleic acid vectors according to this disclosure include recombinant viral vectors. Exemplary viral vectors are set forth herein above. Other viral vectors known in the art can also be used. In addition, viral particles can be used to deliver genome editing system components in nucleic acid and/or peptide form. For example, “empty” viral particles can be assembled to contain any suitable cargo. Viral vectors and viral particles can also be engineered to incorporate targeting ligands to alter target tissue specificity.

[0460] In addition to viral vectors, non-viral vectors can be used to deliver nucleic acids encoding genome editing systems according to the present disclosure. One important category of non-viral nucleic acid vectors are nanoparticles, which can be organic or inorganic. Nanoparticles are well known in the art. Any suitable nanoparticle design can be used to deliver genome editing system components or nucleic acids encoding such components. For instance, organic (e.g. lipid and/or polymer) nanoparticles can be suitable for use as delivery vehicles in certain embodiments of this disclosure.

### Method of Treatment

[0461] Also provided herein are methods for treating or preventing a condition in a subject in need thereof, the method comprising administering to the subject the epigenetic editor composition as described herein, wherein the epigenetic editor complex or protein effects an epigenetic modification of a target polynucleotide in a target gene associated with a disease, condition or disorder in a subject and modulates expression of the target, thereby treating or preventing the disease, condition or disorder.

[0462] Epigenetic modifications effected by the epigenetic editors described herein are sequence specific. In some embodiments, the modification is at a specific site of the target polynucleotide. In some embodiments, the modification is at a specific allele of the target gene. Accordingly, the epigenetic modification may result in modulated expression, for example, reduced or increased expression, of one copy of a target gene harboring a specific allele, and not the other copy of the target gene. In some embodiments, the specific allele is associated with a disease, condition, or disorder.

[0463] In some embodiments, the epigenetic editor reduces expression of a target gene associated with a disease, condition or disorder.

[0464] Epigenetic editors described herein may be administered to a subject in need thereof, in a therapeutically effective amount, to treat a disease, condition or disorder.

[0465] In another aspect, provided herein is a method for treating or preventing a condition in a subject in need thereof, the method comprising administering to the subject the epigenetic editing complex, vectors, nucleic acids, proteins, or compositions as provided herein, wherein the nucleic acid binding domain of the epigenetic editor directs the effector domain to generate an epigenetic modification in a target polynucleotide sequence in a cell of the subject, thereby modulating expression of the target gene and treating or preventing the condition.

[0466] In some embodiments, the modification reduces expression of a functional protein encoded by the target gene in the subject.

[0467] A patient who is being treated for a condition, a disease or a disorder is one who a medical practitioner has diagnosed as having such a condition. Diagnosis may be by any suitable means. Diagnosis and monitoring may involve, for example, detecting the presence of diseased, dying or dead cells in a biological sample (e.g., tissue biopsy, blood test, or urine test), detecting the presence of plaques, detecting the level of a surrogate marker in a biological sample, or detecting symptoms associated with a condition. A patient in whom the development of a condition is being prevented may or may not have received such a diagnosis. One in the art will understand that these patients may have been subjected to the same standard tests as described above or may have been identified, without examination, as one at high risk due to the presence of one or more risk factors (e.g., family history or genetic predisposition).

[0468] A subject may have a disease, a symptom of the disease, or a predisposition toward the disease, with the purpose to cure, heal, alleviate, relieve, alter, remedy, ameliorate, improve, or affect the disease, the symptom of the disease, or the predisposition toward the disease. In some embodiments, the subject has hypercholesterolemia. In some embodiments, the subject has atherosclerotic vascular disease. In some embodiments, the subject has hypertriglyceridemia. In some embodiments, the subject has diabetes. In some embodiments, the subject is a mammal. In some embodiments, the subject is a non-human primate. In some embodiments, the subject is human. Alleviating a disease includes delaying the development or progression of the disease, or reducing disease severity. Alleviating the disease does not necessarily require curative results.

[0469] As used therein, “delaying” the development of a disease means to defer, hinder, slow, retard, stabilize, and/or postpone progression of the disease. This delay can be of varying lengths of time, depending on the history of the disease and/or individuals being treated. A method that “delays” or alleviates the development of a disease, or delays the onset of the disease, is a method that reduces probability of developing one or more symptoms of the disease in a given time frame and/or reduces extent of the symptoms in a given time frame, when compared to not using the method. Such comparisons are typically based on clinical studies, using a number of subjects sufficient to give a statistically significant result.

[0470] “Development” or “progression” of a disease means initial manifestations and/or ensuing progression of the disease. Development of the disease can be detectable and assessed using standard clinical techniques as well known in the art. However, development also refers to progression that may be undetectable. For purpose of this disclosure, development or progression refers to the biological course of the symptoms. “Development” includes occurrence, recurrence, and onset.

[0471] As used herein “onset” or “occurrence” of a disease includes initial onset and/or recurrence. Conventional methods, known to those of ordinary skill in the art of medicine, can be used to administer the isolated polypeptide or pharmaceutical composition to the subject, depending upon the type of disease to be treated or the site of the disease. This composition can also be administered via other conventional routes, e.g., administered orally, parenterally, by inhalation spray, topically, rectally, nasally, buccally, vaginally or via an implanted reservoir.

[0472] The therapeutic methods of the disclosure may be carried out on subjects displaying pathology resulting from a disease or a condition, subjects suspected of displaying pathology resulting from a disease or a condition, and subjects at risk of displaying pathology resulting from a disease or a condition. For example, subjects that have a genetic predisposition to a disease or a condition can be treated prophylactically. Subjects exhibiting symptoms associated with a condition, a disease or a disorder may be treated to decrease the symptoms or to slow down or prevent further progression of the symptoms. The physical changes associated with the increasing severity of a disease or a condition are shown herein to be progressive. Thus, in embodiments of the disclosure, subjects exhibiting mild signs of the pathology associated with a condition or a disease may be treated to improve the symptoms and/or prevent further progression of the symptoms.

[0473] The dosage and frequency (single or multiple doses) administered to a mammal can vary depending upon a variety of factors, for example, whether the mammal suffers from another disease, and its route of administration; size, age, sex, health, body weight, body mass index, and diet of the recipient; nature and extent of symptoms of the disease being treated, kind of concurrent treatment, complications from the disease being treated or other health-related problems. Adjustment and manipulation of established dosages (e.g., frequency and duration) are well within the ability of those skilled in the art. The treatment, such as those disclosed herein, can be administered to the subject on a daily, twice daily, biweekly, monthly or any applicable basis that is therapeutically effective. In embodiments, the treatment is only on an as-needed basis, e.g., upon appearance of signs or symptoms of a condition or a disease.

[0474] Toxicity and therapeutic efficacy of the compositions of the disclosure can be determined by standard pharmaceutical procedures in cell cultures or experimental animals, e.g., for determining the LD50 (the dose lethal to 50% of the population) and the ED50 (the dose therapeutically effective in 50% of the population). The dose ratio between toxic and therapeutic effects (the ratio LD50/ED50) is the therapeutic index. Agents that exhibit high therapeutic indices are preferred. The dosage of agents lies preferably within a range of circulating concentrations that include the ED50 with little or no toxicity. While agents that exhibit toxic side effects may be used, care should be taken to design a delivery system that targets such agents to the site of affected tissue in order to minimize potential damage to uninfected cells and, thereby, reduce side effects.

[0475] The skilled artisan will appreciate that certain factors may influence the dosage and frequency of administration required to effectively treat a subject, including but not limited to the severity of the disease or disorder, previous treatments, the general characteristics of the subject including health, sex, weight and/or age of the subject, and other diseases present. Moreover, treatment of a subject with a therapeutically effective amount of the compositions can include a single treatment or, preferably, can include a series of treatments. It will also be appreciated that the effective dosage of the composition of the disclosure used for treatment may increase or decrease over the course of a particular treatment. Changes in dosage may result and become apparent from the results of diagnostic assays as described herein. The therapeutically-effective dosage will generally be dependent on the patient's status at the time of administration. The precise amount can be determined by routine experimentation but may ultimately lie with the judgment of the clinician, for example, by monitoring the patient for signs of disease and adjusting the treatment accordingly.

[0476] Frequency of administration may be determined and adjusted over the course of therapy, and is generally, but not necessarily, based on treatment and/or suppression and/or amelioration and/or delay of a disease. Alternatively, sustained continuous release formulations of a polypeptide or a polynucleotide may be appropriate. Various formulations and devices for achieving sustained release are known in the art. In some embodiments, dosage is daily, every other day, every three days, every four days, every five days, or every six days. In some embodiments, dosing frequency is once every week, every 2 weeks, every 4 weeks, every 5 weeks, every 6 weeks, every 7 weeks, every 8 weeks, every 9 weeks, or every 10 weeks; or once every month, every 2 months, or every 3 months, or longer. The progress of this therapy is easily monitored by conventional techniques and assays.

[0477] The dosing regimen (including a composition disclosed herein) can vary over time. In some embodiments, for an adult subject of normal weight, doses ranging from about 0.01 to 1000 mg/kg may be administered. In some embodiments, the dose is between 1 to 200 mg. The particular dosage regimen, i.e., dose, timing and repetition, will depend on the particular subject and that subject's medical history, as well as the properties of the polypeptide or the polynucleotide (such as the half-life of the polypeptide or the polynucleotide, and other considerations well known in the art).

[0478] For the purpose of the present disclosure, the appropriate therapeutic dosage of a composition as described herein will depend on the specific agent (or compositions thereof) employed, the formulation and route of administration, the type and severity of the disease, whether the polypeptide or the polynucleotide is administered for preventive or therapeutic purposes, previous therapy, the subject's clinical history and response to the antagonist, and the discretion of the attending physician. Typically, the clinician will administer a polypeptide until a dosage is reached that achieves the desired result.

[0479] Administration of one or more compositions can be continuous or intermittent, depending, for example, upon the recipient's physiological condition, whether the purpose of the administration is therapeutic or prophylactic, and other factors known to skilled practitioners. The administration of a composition may be essentially continuous over a preselected period of time or may be in a series of spaced dose, e.g., either before, during, or after developing a disease.

[0480] The methods and compositions of the disclosure described herein including embodiments thereof can be administered with one or more additional therapeutic regimens or agents or treatments, which can be co-administered to the mammal. By “co-administering” is meant administering one or more additional therapeutic regimens or agents or treatments and the composition of the disclosure sufficiently close in time to enhance the effect of one or more additional therapeutic agents, or vice versa. In this regard, the composition of the disclosure described herein can be administered simultaneously with one or more additional therapeutic regimens or agents or treatments, at a different time, or on an entirely different therapeutic schedule (e.g., the first treatment can be daily, while the additional treatment is weekly). For example, in embodiments, the secondary therapeutic regimens or agents or treatments are administered simultaneously, prior to, or subsequent to the composition of the disclosure.

### Pharmaceutical Compositions

[0481] In some aspects, provided herein, is a pharmaceutical composition for epigenetic modification comprising an epigenetic editor or epigenetic editor complex described herein, or one or more nucleic acid sequences encoding components of the epigenetic editor complex, e.g., nucleic acids encoding an epigenetic editor fusion protein and/or a guide RNA, and a pharmaceutically acceptable carrier. The composition for epigenetic modification described herein can be formulated into pharmaceutical compositions. Pharmaceutical compositions are formulated in a conventional manner using one or more pharmaceutically acceptable inactive ingredients that facilitate processing of the active compounds into preparations that can be used pharmaceutically. Suitable formulations for use in the present disclosure and methods of delivery are generally well known in the art. Proper formulation is dependent upon the route of administration chosen. A summary of pharmaceutical compositions described herein can be found, for example, in Remington: The Science and Practice of Pharmacy, Nineteenth Ed (Easton, Pa.: Mack Publishing Company, 1995); Hoover, John E., Remington's Pharmaceutical Sciences, Mack Publishing Co., Easton, Pennsylvania 1975; Liberman, H. A. and Lachman, L., Eds., Pharmaceutical Dosage Forms, Marcel Decker, New York, N.Y., 1980; and Pharmaceutical Dosage Forms and Drug Delivery Systems, Seventh Ed. (Lippincott Williams & Wilkins 1999), herein incorporated by reference for such disclosure.

[0482] A pharmaceutical composition can be a mixture of an epigenetic editor or nucleic acids encoding same as described herein and one or more other chemical components (i.e., pharmaceutically acceptable ingredients), such as carriers, excipients, binders, filling agents, suspending agents, flavoring agents, sweetening agents, disintegrating agents, dispersing agents, surfactants, lubricants, colorants, diluents, solubilizers, moistening agents, plasticizers, stabilizers, penetration enhancers, wetting agents, anti-foaming agents, antioxidants, preservatives, or one or more combination thereof. The pharmaceutical composition facilitates administration of the epigenetic editor, for example, a nucleic acid encoding a zinc finger-epigenetic effector fusion protein or a Cas9-epigenetic effector fusion protein and a gRNA or sgRNA described herein to an organism or a subject in need thereof.

[0483] The pharmaceutical compositions of the present disclosure can be administered to a subject using any suitable methods known in the art. The pharmaceutical compositions described herein can be administered to the subject in a variety of ways, including parenterally, intravenously, intradermally, intramuscularly, colonically, rectally, or intraperitoneally. In some embodiments, the pharmaceutical compositions can be administered by intraperitoneal injection, intramuscular injection, subcutaneous injection, or intravenous injection of the subject. In some embodiments, the pharmaceutical compositions can be administered parenterally, intravenously, intramuscularly, or orally.

[0484] For administration by inhalation, the adenovirus described herein can be formulated for use as an aerosol, a mist, or a powder. For buccal or sublingual administration, the pharmaceutical compositions may be formulated in the form of tablets, lozenges, or gels formulated in a conventional manner. In some embodiments, the adenovirus described herein can be prepared as transdermal dosage forms. In some embodiments, the adenovirus described herein can be formulated into a pharmaceutical composition suitable for intramuscular, subcutaneous, or intravenous injection. In some embodiments, the adenovirus described herein can be administered topically and can be formulated into a variety of topically administrable compositions, such as solutions, suspensions, lotions, gels, pastes, medicated sticks, balms, creams, or ointments. In some embodiments, the adenovirus described herein can be formulated in rectal compositions such as enemas, rectal gels, rectal foams, rectal aerosols, suppositories, jelly suppositories, or retention enemas. In some embodiments, the adenovirus described herein can be formulated for oral administration such as a tablet, a capsule, or liquid in the form of aqueous suspensions or solutions selected from the group including, but not limited to, aqueous oral dispersions, emulsions, solutions, elixirs, gels, and syrups.

[0485] In some embodiments, the pharmaceutical composition for epigenetic modification comprising an epigenetic editor described herein or nucleic acid sequences encoding the same further comprises a therapeutic agent. The additional therapeutic agent may modulate different aspects of the disease, disorder, or condition being treated and provide a greater overall benefit than administration of either the replication competent recombinant adenovirus or the therapeutic agent alone. Therapeutic agents include, but are not limited to, a chemotherapeutic agent, a radiotherapeutic agent, a hormonal therapeutic agent, and/or an immunotherapeutic agent. In some embodiments, the therapeutic agent may be a radiotherapeutic agent. In some embodiments, the therapeutic agent may be a hormonal therapeutic agent. In some embodiments, the therapeutic agent may be an immunotherapeutic agent. In some embodiments, the therapeutic agent is a chemotherapeutic agent. Preparation and dosing schedules for additional therapeutic agents can be used according to manufacturers' instructions or as determined empirically by a skilled practitioner. For example, preparation and dosing schedules for chemotherapy are also described in The Chemotherapy Source Book, 4th Edition, 2008, M. C. Perry, Editor, Lippincott, Williams & Wilkins, Philadelphia, PA.

[0486] The subjects that can be treated with epigenetic modification compositions can be any subject with a disease or a condition. For example, the subject may be a eukaryotic subject, such as an animal. In some embodiments, the subject is a mammal, e.g., human. In some embodiments, the subject is a human. In some embodiments, the subject is a non-human animal. In some embodiments, the subject is a fetus, an embryo, or a child. In some embodiments, the subject is a non-human primate such as chimpanzee, and other apes and monkey species; farm animals such as cattle, horses, sheep, goats, pigs; domestic animals such as rabbits, dogs, and cats; laboratory animals including rodents, such as rats, mice, and guinea pigs, and the like.

[0487] In some embodiments, the subject is prenatal (e.g., a fetus), a child (e.g., a neonate, an infant, a toddler, a preadolescent), an adolescent, a pubescent, or an adult (e.g., an early adult, a middle-aged adult, a senior citizen). The human subject can be between about 0 month and about 120 years old, or older. The human subject can be between about 0 and about 12 months old; for example, about 1, 2, 3, 4, 5, 6, 7, 8, 9, 10, 11, or 12 months old. The human subject can be between about 0 and 12 years old; for example, between about 0 and 30 days old; between about 1 month and 12 months old; between about 1 year and 3 years old; between about 4 years and 5 years old; between about 4 years and 12 years old; about 1, 2, 3, 4, 5, 6, 7, 8, 9, 10, 11, or 12 years old. The human subject can be between about 13 years and 19 years old; for example, about 13, 14, 15, 16, 17, 18, or 19 years old. The human subject can be between about 20 and about 39 years old; for example, about 20, 21, 22, 23, 24, 25, 26, 27, 28, 29, 30, 31, 32, 33, 34, 35, 36, 37, 38, or 39 years old. The human subject can be between about 40 to about 59 years old; for example, about 40, 41, 42, 43, 44, 45, 46, 47, 48, 49, 50, 51, 52, 53, 54, 55, 56, 57, 58, or 59 years old. The human subject can be greater than 59 years old; for example, about 60, 61, 62, 63, 64, 65, 66, 67, 68, 69, 70, 71, 72, 73, 74, 75, 76, 77, 78, 79, 80, 81, 82, 83, 84, 85, 86, 87, 88, 89, 90, 91, 92, 93, 94, 95, 96, 97, 98, 99, 100, 101, 102, 103, 104, 105, 106, 107, 108, 109, 110, 111, 112, 113, 114, 115, 116, 117, 118, 119, or 120 years old. The human subjects can include male subjects and/or female subjects.

[0488] In another aspect, provided herein is a lipid nanoparticle (LNP) comprising the composition as provided herein. As used herein, a “lipid nanoparticle (LNP) composition” or a “nanoparticle composition” is a composition comprising one or more described lipids. LNP compositions are typically sized on the order of micrometers or smaller and may include a lipid bilayer. Nanoparticle compositions encompass lipid nanoparticles (LNPs), liposomes (e.g., lipid vesicles), and lipoplexes. In some embodiments, a LNP refers to any particle that has a diameter of less than 1000 nm, 500 nm, 250 nm, 200 nm, 150 nm, 100 nm, 75 nm, 50 nm, or 25 nm. In some embodiments, a nanoparticle may range in size from 1-1000 nm, 1-500 nm, 1-250 nm, 25-200 nm, 25-100 nm, 35-75 nm, or 25-60 nm.

[0489] In some embodiments, an LNP may be made from cationic, anionic, or neutral lipids. In some embodiments, an LNP may comprise neutral lipids, such as the fusogenic phospholipid 1,2-Dioleoyl-sn-glycero-3-phosphoethanolamine (DOPE) or the membrane component cholesterol, as helper lipids to enhance transfection activity and nanoparticle stability. In some embodiments, an LNP may comprise hydrophobic lipids, hydrophilic lipids, or both hydrophobic and hydrophilic lipids. Any lipid or combination of lipids that are known in the art can be used to produce an LNP. Examples of lipids used to produce LNPs include, but are not limited to DOTMA (N[1-(2,3-dioleyloxy)propyl]-N,N,N-trimethylammonium chloride), DOSPA (N,N-dimethyl-N-([2-sperminecarboxamido]ethyl)-2,3-bis(dioleyloxy)-1-propaniminium pentahydrochloride), DOTAP (1,2-Dioleoyl-3-trimethylammonium propane), DMRIE (N-(2-hydroxyethyl)-N,N-dimethyl-2,3-bis(tetradecyloxy-1-propanaminiumbromide), DC-cholesterol (3β-[N-(N′,N′-dimethylaminoethane)-carbamoyl]cholesterol), DOTAP-cholesterol, GAP-DMORIE-DPyPE, and GL67A-DOPE-DMPE (,2-Bis(dimethylphosphino)ethane)-polyethylene glycol (PEG). Examples of cationic lipids include, but are not limited to, 98N12-5, C12-200, DLin-KC2-DMA (KC2), DLin-MC3-DMA (MC3), XTC, MD1, and 7C1. Examples of neutral lipids include, but are not limited to, DPSC, DPPC (Dipalmitoylphosphatidylcholine), POPC (1-palmitoyl-2-oleoyl-sn-glycero-3-phosphocholine), DOPE, and SM (sphingomyelin). Examples of PEG-modified lipids include, but are not limited to, PEG-DMG (Dimyristoyl glycerol), PEG-CerC14, and PEG-CerC20. In some embodiments, the lipids may be combined in any number of molar ratios to produce a LNP. In some embodiments, the polynucleotide may be combined with lipid(s) in a wide range of molar ratios to produce an LNP.

[0490] Also disclosed herein, in certain embodiments, are kits and articles of manufacture for use with one or more methods described herein. Such kits include a carrier, package, or container that is compartmentalized to receive one or more containers such as vials, tubes, and the like, each of the container(s) comprising one of the separate elements to be used in a method described herein. Suitable containers include, for example, bottles, vials, syringes, and test tubes. In one embodiment, the containers are formed from a variety of materials such as glass or plastic.

[0491] The articles of manufacture provided herein contain packaging materials. Examples of pharmaceutical packaging materials include, but are not limited to, blister packs, bottles, tubes, bags, containers, and any packaging material suitable for a selected formulation and intended mode of administration and treatment.

[0492] For example, the container(s) include the composition of the disclosure, and optionally in addition with therapeutic regimens or agents disclosed herein. Such kits optionally include an identifying description or label or instructions relating to its use in the methods described herein.

[0493] A kit typically includes labels listing contents and/or instructions for use, and package inserts with instructions for use. A set of instructions will also typically be included.

[0494] In embodiments, a label is on or associated with the container. In one embodiment, a label is on a container when letters, numbers or other characters forming the label are attached, molded or etched into the container itself; a label is associated with a container when it is present within a receptacle or carrier that also holds the container, e.g., as a package insert. In one embodiment, a label is used to indicate that the contents are to be used for a specific therapeutic application. The label also indicates directions for use of the contents, such as in the methods described herein.

### EXAMPLES

[0495] The following examples are included for illustrative purposes only and are not intended to limit the scope of the disclosure.

### Example 1: Zinc Finger Design

[0496] Zinc finger binding sites were selected based on the availability of zinc finger modules, their location and orientation in the target gene of interest. For example, in a sequence comprising the EF1alpha promoter driving expression of GFP, an exemplary sequence contains the 3′ 200 base pairs of the EF1alpha promoter, the 23 base pairs between the promoter and the GFP start codon and the 5′ 177 base pairs of the GFP coding sequence. Exemplary binding sites for 6-finger zinc finger proteins are in “Target Site Table” and are shown in bold, or in italics when the binding site overlaps with another binding site in SEQ ID NO.: 695, shown below:

GTACGTCGTCTTTAGGTTGGGGGGAGGGGTTTTATGCGATGGAGTTTCC
CCACACTGAGTGGGTGGAGACTGAAGTTAGGCCAGCTTGGCACTTGATG
TAATTCTCCTTGGAATTTGCCCTTTTTGAGTTTGGATCTTGGTTCATTC
TCAAGCCTCAGACAGTGGTTCAAAGTTTTTTTCTTCCATTTCAGGTGTC
GTGACGCTAGCGCTACCGGTCGCCACCATGGTGAGCAAGGGCGCCGAGC
TGTTCACCGGCATCGTGCCCATCCTGATCGAGCTGAATGGCGATGTGAA
TGGCCACAAGTTCAGCGTGAGCGGCGAGGGCGAGGGCGATGCCACCTAC
GGCAAGCTGACCCTGAAGTTCATCTGCACCACCGGCAAGCTGCCTGTGC
CCTGGCCC

TABLE 7
Target Site Table

| Target Site | Sequence |
|---|---|
| GFP-1 | SEQ ID NO.: 696 |
| GFP-2 | SEQ ID NO.: 697 |
| GFP-3 | SEQ ID NO.: 698 |
| GFP-4 | SEQ ID NO.: 699 |
| GFP-5 | SEQ ID NO.: 700 |
| GFP-6 | SEQ ID NO.: 701 |
| GFP-7 | SEQ ID NO.: 702 |

Zinc finger sequences were designed for binding of the above described target site. Exemplary Zinc finger sequences are as follows: SRPGERPFQCRICMRNFS[F1]HTRTHTGEKPFQCRICMRNFS[F2]HLRTH[linker1]FQCRIC MRNFS[F3]HTRTHTGEKPFQCRICMRNFS[F4]HLRTH[linker2]FQCRICMRNFS[F5]HTRT HTGEKPFQCRICMRNFS[F6]HLRTHLRGS (SEQ ID NO.: 703)
Where zinc finger proteins for a given target site have the following linkers:

TABLE 8
Linkers for a Given Target Site

| Target Site | Sequence | Linker 1 | Linker 2 |
|---|---|---|---|
| GFP-1 | SEQ ID NO.: 696 | SEQ ID NO.: 704 | SEQ ID NO.: 705 |
| GFP-2 | SEQ ID NO.: 697 | SEQ ID NO.: 705 | SEQ ID NO.: 704 |
| GFP-3 | SEQ ID NO.: 698 | SEQ ID NO.: 704 | SEQ ID NO.: 705 |
| GFP-4 | SEQ ID NO.: 699 | SEQ ID NO.: 704 | SEQ ID NO.: 704 |
| GFP-5 | SEQ ID NO.: 700 | SEQ ID NO.: 704 | SEQ ID NO.: 704 |
| GFP-6 | SEQ ID NO.: 701 | SEQ ID NO.: 704 | SEQ ID NO.: 704 |
| GFP-7 | SEQ ID NO.: 702 | SEQ ID NO.: 704 | SEQ ID NO.: 705 |

and where recognition helices for a given target site may be selected from the following SEQ ID NO.: 716-961:

TABLE 9
Recognition Helices for a Given Target Site

| Target | Zinc Finger | | | | | | |
|---|---|---|---|---|---|---|---|
| Site | Protein Name | F1 | F2 | F3 | F4 | F5 | F6 |
| GFP-1 | GFP1-ZF1 | HKSSLTR | RTEHLAR | QSAHLKR | RTEHLAR | HKSSLTR | RPESLAP |
| | | (SEQ ID | (SEQ ID | (SEQ ID | (SEQ ID | (SEQ ID | (SEQ ID NO: |
| | | NO: 716) | NO: 757) | NO: 798) | NO: 839) | NO: 880) | 921) |
| | GFP1-ZF2 | HKSSLTR | RTEHLAR | TSAHLAR | RREHLVR | HKSSLTR | RPESLAP |
| | | (SEQ ID | (SEQ ID | (SEQ ID | (SEQ ID | (SEQ ID | (SEQ ID NO: |
| | | NO: 717) | NO: 758) | NO: 799) | NO: 840) | NO: 881) | 922) |
| | GFP1-ZF3 | IKAILTR | RREHLVR | QSAHLKR | RTEHLAR | HKSSLTR | RPESLAP |
| | | (SEQ ID | (SEQ ID | (SEQ ID | (SEQ ID | (SEQ ID | (SEQ ID NO: |
| | | NO: 718) | NO: 759) | NO: 800) | NO: 841) | NO: 882) | 923) |
| | GFP1-ZF4 | IKAILTR | RREHLVR | TSAHLAR | RREHLVR | HKSSLTR | RPESLAP |
| | | (SEQ ID | (SEQ ID | (SEQ ID | (SEQ ID | (SEQ ID | (SEQ ID NO: |
| | | NO: 719) | NO: 760) | NO: 801) | NO: 842) | NO: 883) | 924) |
| GFP-2 | GFP2-ZF1 | TSTLLNR | QQTNLTR | DEANLRR | QSAHLKR | IPNKLAR | RREVLEN |
| | | (SEQ ID | (SEQ ID | (SEQ ID | (SEQ ID | (SEQ ID | (SEQ ID NO: |
| | | NO: 720) | NO: 761) | NO: 802) | NO: 843) | NO: 884) | 925) |
| | GFP2-ZF2 | TSTLLNR | QQTNLTR | DEANLRR | QSAHLKR | EAHHLSR | RKDALHV |
| | | (SEQ ID | (SEQ ID | (SEQ ID | (SEQ ID | (SEQ ID | (SEQ ID NO: |
| | | NO: 721) | NO: 762) | NO: 803) | NO: 844) | NO: 885) | 926) |
| | GFP2-ZF3 | TSTLLNR | QQTNLTR | DRGNLTR | QGGHLKR | IPNKLAR | RREVLEN |
| | | (SEQ ID | (SEQ ID | (SEQ ID | (SEQ ID | (SEQ ID | (SEQ ID NO: |
| | | NO: 722) | NO: 763) | NO: 804) | NO: 845) | NO: 886) | 927) |
| | GFP2-ZF4 | TSTLLNR | QQTNLTR | DRGNLTR | QGGHLKR | EAHHLSR | RKDALHV |
| | | (SEQ ID | (SEQ ID | (SEQ ID | (SEQ ID | (SEQ ID | (SEQ ID NO: |
| | | NO: 723) | NO: 764) | NO: 805) | NO: 846) | NO: 887) | 928) |
| | GFP2-ZF5 | HKSSLTR | QTNNLGR | DEANLRR | QSAHLKR | IPNKLAR | RREVLEN |
| | | (SEQ ID | (SEQ ID | (SEQ ID | (SEQ ID | (SEQ ID | (SEQ ID NO: |
| | | NO: 724) | NO: 765) | NO: 806) | NO: 847) | NO: 888) | 929) |
| | GFP2-ZF6 | HKSSLTR | QTNNLGR | DEANLRR | QSAHLKR | EAHHLSR | RKDALHV |
| | | (SEQ ID | (SEQ ID | (SEQ ID | (SEQ ID | (SEQ ID | (SEQ ID NO: |
| | | NO: 725) | NO: 766) | NO: 807) | NO: 848) | NO: 889) | 930) |
| | GFP2-ZF7 | HKSSLTR | QTNNLGR | DRGNLTR | QGGHLKR | IPNKLAR | RREVLEN |
| | | (SEQ ID | (SEQ ID | (SEQ ID | (SEQ ID | (SEQ ID | (SEQ ID NO: |
| | | NO: 726) | NO: 767) | NO: 808) | NO: 849) | NO: 890) | 931) |
| | GFP2-ZF8 | HKSSLTR | QTNNLGR | DRGNLTR | QGGHLKR | EAHHLSR | RKDALHV |
| | | (SEQ ID | (SEQ ID | (SEQ ID | (SEQ ID | (SEQ ID | (SEQ ID NO: |
| | | NO: 727) | NO: 768) | NO: 809) | NO: 850) | NO: 891) | 932) |
| GFP-3 | GFP3-ZF1 | QQTNLTR | IRHHLKR | DSSVLRR | LSTNLTR | QSTTLKR | RSDHLSL |
| | | (SEQ ID | (SEQ ID | (SEQ ID | (SEQ ID | (SEQ ID | (SEQ ID NO: |
| | | NO: 728) | NO: 769) | NO: 810) | NO: 851) | NO: 892) | 933) |
| | GFP3-ZF2 | QQTNLTR | IRHHLKR | DGSTLNR | VRHNLTR | QSTTLKR | RSDHLSL |
| | | (SEQ ID | (SEQ ID | (SEQ ID | (SEQ ID | (SEQ ID | (SEQ ID NO: |
| | | NO: 729) | NO: 770) | NO: 811) | NO: 852) | NO: 893) | 934) |
| | GFP3-ZF3 | RKPNLLR | EAHHLSR | DSSVLRR | LSTNLTR | QSTTLKR | RSDHLSL |
| | | (SEQ ID | (SEQ ID | (SEQ ID | (SEQ ID | (SEQ ID | (SEQ ID NO: |
| | | NO: 730) | NO: 771) | NO: 812) | NO: 853) | NO: 894) | 935) |
| | GFP3-ZF4 | RKPNLLR | EAHHLSR | DGSTLNR | VRHNLTR | QSTTLKR | RSDHLSL |
| | | (SEQ ID | (SEQ ID | (SEQ ID | (SEQ ID | (SEQ ID | (SEQ ID NO: |
| | | NO: 731) | NO: 772) | NO: 813) | NO: 854) | NO: 895) | 936) |
| GFP-4 | GFP4-ZF1 | VRHNLTR | ESGHLKR | RQDNLGR | KNHSLNN | RQDNLGR | KNHSLNN |
| | | (SEQ ID | (SEQ ID | (SEQ ID | (SEQ ID | (SEQ ID | (SEQ ID NO: |
| | | NO: 732) | NO: 773) | NO: 814) | NO: 855) | NO: 896) | 937) |
| GFP-5 | GFP5-ZF1 | DSSVLRR | LSTNLTR | LKEHLTR | RVDNLPR | LKEHLTR | RVDNLPR |
| | | (SEQ ID | (SEQ ID | (SEQ ID | (SEQ ID | (SEQ ID | (SEQ ID NO: |
| | | NO: 733) | NO: 774) | NO: 815) | NO: 856) | NO: 897) | 938) |
| | GFP5-ZF2 | DSSVLRR | LSTNLTR | LKEHLTR | RVDNLPR | SPSKLVR | RQDNLGR |
| | | (SEQ ID | (SEQ ID | (SEQ ID | (SEQ ID | (SEQ ID | (SEQ ID NO: |
| | | NO: 734) | NO: 775) | NO: 816) | NO: 857) | NO: 898) | 939 |
| | GFP5-ZF3 | DSSVLRR | LSTNLTR | SPSKLVR | RQDNLGR | LKEHLTR | RVDNLPR |
| | | (SEQ ID | (SEQ ID | (SEQ ID | (SEQ ID | (SEQ ID | (SEQ ID NO: |
| | | NO: 735) | NO: 776) | NO: 817) | NO: 858) | NO: 899) | 940) |
| | GFP5-ZF4 | DSSVLRR | LSTNLTR | SPSKLVR | RQDNLGR | SPSKLVR | RQDNLGR |
| | | (SEQ ID | (SEQ ID | (SEQ ID | (SEQ ID | (SEQ ID | (SEQ ID NO: |
| | | NO: 736) | NO: 777) | NO: 818) | NO: 859) | NO: 900) | 941) |
| | GFP5-ZF5 | DGSTLNR | VRHNLTR | LKEHLTR | RVDNLPR | LKEHLTR | RVDNLPR |
| | | (SEQ ID | (SEQ ID | (SEQ ID | (SEQ ID | (SEQ ID | (SEQ ID NO: |
| | | NO: 737) | NO: 778) | NO: 819) | NO: 860) | NO: 901) | 942) |
| | GFP5-ZF6 | DGSTLNR | VRHNLTR | LKEHLTR | RVDNLPR | SPSKLVR | RQDNLGR |
| | | (SEQ ID | (SEQ ID | (SEQ ID | (SEQ ID | (SEQ ID | (SEQ ID NO: |
| | | NO: 738) | NO: 779) | NO: 820) | NO: 861) | NO: 902) | 943) |
| | GFP5-ZF7 | DGSTLNR | VRHNL TR | SPSKLVR | RQDNLGR | LKEHLTR | RVDNLPR |
| | | (SEQ ID | (SEQ ID | (SEQ ID | (SEQ ID | (SEQ ID | (SEQ ID NO: |
| | | NO: 739) | NO: 780) | NO: 821) | NO: 862) | NO: 903) | 944) |
| | GFP5-ZF8 | DGSTLNR | VRHNLTR | SPSKLVR | RQDNLGR | SPSKLVR | RQDNLGR |
| | | (SEQ ID | (SEQ ID | (SEQ ID | (SEQ ID | (SEQ ID | (SEQ ID NO: |
| | | NO: 740) | NO: 781) | NO: 822) | NO: 863) | NO: 904) | 945) |
| GFP-6 | GFP6-ZF1 | RKPNLLR | VRHNLTR | DKAQLGR | EAHHLSR | RQSRLQR | KGDHLRR |
| | | (SEQ ID | (SEQ ID | (SEQ ID | (SEQ ID | (SEQ ID | (SEQ ID NO: |
| | | NO: 741) | NO: 782) | NO: 823) | NO: 864) | NO: 905) | 946) |
| | GFP6-ZF2 | RKPNLLR | VRHNLTR | DKAQLGR | EAHHLSR | EAHHLSR | DPSNLRR |
| | | (SEQ ID | (SEQ ID | (SEQ ID | (SEQ ID | (SEQ ID | (SEQ ID NO: |
| | | NO: 742) | NO: 783) | NO: 824) | NO: 865) | NO: 906) | 947) |
| | GFP6-ZF3 | RKPNLLR | VRHNLTR | QSTTLKR | VDHHLRR | RQSRLQR | KGDHLRR |
| | | (SEQ ID | (SEQ ID | (SEQ ID | (SEQ ID | (SEQ ID | (SEQ ID NO: |
| | | NO: 743) | NO: 784) | NO: 825) | NO: 866) | NO: 907) | 948) |
| | GFP6-ZF4 | RKPNLLR | VRHNLTR | QSTTLKR | VDHHLRR | EAHHLSR | DPSNLRR |
| | | (SEQ ID | (SEQ ID | (SEQ ID | (SEQ ID | (SEQ ID | (SEQ ID NO: |
| | | NO: 744) | NO: 785) | NO: 826) | NO: 867) | NO: 908) | 949) |
| | GFP6-ZF5 | QQTNLTR | VGSNLTR | DKAQLGR | EAHHLSR | RQSRLQR | KGDHLRR |
| | | (SEQ ID | (SEQ ID | (SEQ ID | (SEQ ID | (SEQ ID | (SEQ ID NO: |
| | | NO: 745) | NO: 786) | NO: 827) | NO: 868) | NO: 909) | 950) |
| | GFP6-ZF6 | QQTNLTR | VGSNLTR | DKAQLGR | EAHHLSR | EAHHLSR | DPSNLRR |
| | | (SEQ ID | (SEQ ID | (SEQ ID | (SEQ ID | (SEQ ID | (SEQ ID NO: |
| | | NO: 746) | NO: 787) | NO: 828) | NO: 869) | NO: 910) | 951) |
| | GFP6-ZF7 | QQTNLTR | VGSNLTR | QSTTLKR | VDHHLRR | RQSRLQR | KGDHLRR |
| | | (SEQ ID | (SEQ ID | (SEQ ID | (SEQ ID | (SEQ ID | (SEQ ID NO: |
| | | NO: 747) | NO: 788) | NO: 829) | NO: 870) | NO: 911) | 952) |
| | GFP6-ZF8 | QQTNLTR | VGSNLTR | QSTTLKR | VDHHLRR | EAHHLSR | DPSNLRR |
| | | (SEQ ID | (SEQ ID | (SEQ ID | (SEQ ID | (SEQ ID | (SEQ ID NO: |
| | | NO: 748) | NO: 789) | NO: 830) | NO: 871) | NO: 912) | 953) |
| GFP-7 | GFP7-ZF1 | QSTTLKR | VDHHLRR | EAHHLSR | DPSNLRR | QRSDLTR | QGGTLRR |
| | | (SEQ ID | (SEQ ID | (SEQ ID | (SEQ ID | (SEQ ID | (SEQ ID NO: |
| | | NO: 749) | NO: 790) | NO: 831) | NO: 872) | NO: 913) | 954) |
| | GFP7-ZF2 | QSTTLKR | VDHHLRR | EAHHLSR | DPSNLRR | TKQILGR | QSTTLKR |
| | | (SEQ ID | (SEQ ID | (SEQ ID | (SEQ ID | (SEQ ID | (SEQ ID NO: |
| | | NO: 750) | NO: 791) | NO: 832) | NO: 873) | NO: 914) | 955) |
| | GFP7-ZF3 | QSTTLKR | VDHHLRR | RQSRLQR | DSSVLRR | QRSDLTR | QGGTLRR |
| | | (SEQ ID | (SEQ ID | (SEQ ID | (SEQ ID | (SEQ ID | (SEQ ID NO: |
| | | NO: 751) | NO: 792) | NO: 833) | NO: 874) | NO: 915) | 956) |
| | GFP7-ZF4 | QSTTLKR | VDHHLRR | RQSRLQR | DSSVLRR | TKQILGR | QSTTLKR |
| | | (SEQ ID | (SEQ ID | (SEQ ID | (SEQ ID | (SEQ ID | (SEQ ID NO: |
| | | NO: 752) | NO: 793) | NO: 834) | NO: 875) | NO: 916) | 957) |
| | GFP7-ZF5 | DKAQLGR | EAHHLSR | EAHHLSR | DPSNLRR | QRSDLTR | QGGTLRR |
| | | (SEQ ID | (SEQ ID | (SEQ ID | (SEQ ID | (SEQ ID | (SEQ ID NO: |
| | | NO: 753) | NO: 794) | NO: 835) | NO: 876) | NO: 917) | 958) |
| | GFP7-ZF6 | DKAQLGR | EAHHL SR | EAHHLSR | DPSNLRR | TKQILGR | QSTTLKR |
| | | (SEQ ID | (SEQ ID | (SEQ ID | (SEQ ID | (SEQ ID | (SEQ ID NO: |
| | | NO: 754) | NO: 795) | NO: 836) | NO: 877) | NO: 918) | 959) |
| | GFP7-ZF7 | DKAQLGR | EAHHLSR | RQSRLQR | DSSVLRR | QRSDLTR | QGGTLRR |
| | | (SEQ ID | (SEQ ID | (SEQ ID | (SEQ ID | (SEQ ID | (SEQ ID NO: |
| | | NO: 755) | NO: 796) | NO: 837) | NO: 878) | NO: 919) | 960) |
| | GFP7-ZF8 | DKAQLGR | EAHHLSR | RQSRLQR | DSSVLRR | TKQILGR | QSTTLKR |
| | | (SEQ ID | (SEQ ID | (SEQ ID | (SEQ ID | (SEQ ID | (SEQ ID NO: |
| | | NO: 756) | NO: 797) | NO: 838) | NO: 879) | NO: 920) | 961) |

### Example 2: Epigenetic Editor Sequences

[0497] Amino acid sequences of exemplary epigenetic editors are provided below. Exemplary fusion protein DNMT3A-3L-ZF-KRAB (SEQ ID NO.: 978) where zinc finger is GFP1-ZF1:

MAPKKKRKMNHDQEFDPPKVYPPVPAEKRKPIRVLSLEDGIATGLLVLK
DLGIQVDRYIASEVCEDSITVGMVRHQGKIMYVGDVRSVTQKHIQEWGP
FDLVIGGSPCNDLSIVNPARKGLYEGTGRLFFEFYRLLHDARPKEGDDR
PFFWLFENVVAMGVSDKRDISRFLESNPVMIDAKEVSAAHRARYFWGNL
PGMNRPLASTVNDKLELQECLEHGRIAKFSKVRTITTRSNSIKQGKDQH
FPVFMNEKEDILWCTEMERVFGFPVHYTDVSNMSRLARQRLLGRSWSVP
VIRHLFAPLKEYFACVSSGNSNANSRGPSFSSGLVPLSLRGSHMGPMEI
YKTVSAWKRQPVRVLSLFRNIDKVLKSLGFLESGSGSGGGTLKYVEDVT
NVVRRDVEKWGPFDLVYGSTQPLGSSCDRCPGWYMFQFHRILQYALPRQ
ESQRPFFWIFMDNLLLTEDDQETTTRFLQTEAVTLQDVRGRDYQNAMRV
WSNIPGLKSKHAPLTPKEEEYLQAQVRSRSKLDAPKVDLLVKNCLLPLR
EYFKYFSQNSLPLSGGGGSGGGGSVGIHGVPSRPGERPFQCRICMRNFS
HKSSLTRHTRTHTGEKPFQCRICMRNFSRTEHLARHLRTHTGSQKPFQC
RICMRNFSQSAHLKRHTRTHTGEKPFQCRICMRNFSRTEHLARHLRTHT
GGGGSQKPFQCRICMRNFSHKSSLTRHTRTHTGEKPFQCRICMRNFSRP
ESLAPHLRTHLRGSGGGSMDAKSLTAWSRTLVTFKDVFVDFTREEWKLL
DTAQQIVYRNVMLENYKNLVSLGYQLTKPDVILRLEKGEEPWLVEREIH
QETHPDSETAFEIKSSV
(italics: DNMT3A; Bold: DNMT3L; underline:KRAB)

### Example 3: Guide RNA Design

[0498] Cas9 protospacers are chosen based on homology from sequences that perfectly match or nearly perfectly match spacer sequences in target DNA sequences and predicted by the MIT Specificity Score (calculated by http://crispor.tefor.net/).

[0499] gRNA protospacer sequences that would permit epigenetic editors containing a Streptococcus pyogenes Cas9, or another Cas that can use the NGG PAM, to recognize the protospacer sequences identified throughout the target gene. gRNAs containing spacers of 20 nts and a total length of 100 nts are synthesized. gRNAs are co-transfected with mRNA encoding the Cas9 epigenetic editor fusion protein into primary human hepatocytes via MessengerMax reagent (Lipofectamine). After transfection, genomic DNA from the hepatocytes is harvested, and transcript expression level of the target gene was assessed by qRT-PCR.

### Example 4: Epigenetic Editor Mediated Repression of Target Gene

[0500] Candidate zinc fingers are screened as described using ZiFit (http://bindr.gdcb.iastate.edu/ZiFiT/). Human K562 cells are cultured in RPMI 1640 medium (Gibco) with 10% HI-FBS (Gibco), 1% Glutamax (Gibco) and 1% Pen/Strep (Gibco), and are transfected with plasmids encoding various KRAB-ZF-Dnmt3A-Dnmt3L fusion proteins by nucleofecting 1×10\hat{ }6 dividing cells with 10 μg of DNA in 100 μl of Kit V solution (Lonza) using program T-016 on the Nucleofector 2b Device (Lonza). Nucleofected cells are incubated in 6-well plates at 370 C for 4 days following nucleofection. Genomic DNA and total RNA are harvested 4 days post-transfection. Genomic DNA is used for methylation analysis. Total RNA is extracted and the expression of the target gene and two reference genes (ATP5b and RPL38) are monitored using real-time RT-qPCR.

[0501] Methylation state determination: Bisulfite DNA sequencing of the target gene locus from these transfected cell populations are performed as follows. Genomic DNA is isolated from transfected cells using the Qiagen Blood Mini kit. 200-1000 ng of genomic DNA is bisulfite treated using either the EZ DNA Methylation Kit (Zymo), EZ DNA Methylation-Lightning Kit (Zymo), or Cells-to-CpG Bisulfite Conversion Kit (Applied Biosystems) following recommended protocols. PCR amplification of Bis-DNA is performed using Pyromark PCR kit (Qiagen). Illumina adapters and barcodes are added by PCR with Phusion High-Fidelity PCR enzyme (NEB) and amplicons were sequenced on an Illumina MiSeq system. Total RNA is isolated from the same cells with the PureLink RNA mini kit (Ambion) according to manufacturer's instructions. Reverse transcription is performed with the Superscriptlll RT kit (Invitrogen) and Tagman assays were run on an Applied Biosystems 7500Fast Real Time PCR machine.

[0502] Testing Repression Domains: To test the functionality of candidate repression domains, the domain is fused to a DNA-binding domain for testing in human cells. The effector domain, identified and extracted from the full protein sequence may be fused to the N-terminal or C-terminal end of any DNA-binding domain, using a variety of linkers. For example, a repressor domain may be fused to Cas9. This fusion protein is then co-delivered into cells, along with a gRNA, using standard cell culture techniques. This may include plasmid transfection or electroporation, mRNA transfection or electroporation, or viral transduction. Initial testing of effector domains can easily be performed in reporter cell lines in which a fluorescent marker has been integrated to enable easy FACS-based readout. Alternatively, endogenous genes can be targeted. Genes encoding cell surface markers can be easily quantified by flow cytometry and expression of any gene target can be quantified by standard molecular biology techniques such as RT-qPCR, ddPCR, Western blot, etc. To test candidate repression domains, decreased expression of the target gene is quantified by these methods. Truncations and mutations can be introduced into the effector domain to generate multiple variants for testing.

[0503] Testing Activation Domains: To test the functionality of candidate activation domains, the domain is fused to a DNA-binding domain for testing in human cells. The effector domain, identified and extracted from the full protein sequence may be fused to the N-terminal or C-terminal end of any DNA-binding domain, using a variety of linkers. For example, an activation domain may be fused to Cas9. This fusion protein is then co-delivered into cells, along with a gRNA, using standard cell culture techniques. This may include plasmid transfection or electroporation, mRNA transfection or electroporation, or viral transduction. Initial testing of effector domains can easily be performed in reporter cell lines in which a fluorescent marker has been integrated to enable easy FACS-based readout. Alternatively, endogenous genes can be targeted. Genes encoding cell surface markers can be easily quantified by flow cytometry and expression of any gene target can be quantified by standard molecular biology techniques such as RT-qPCR, ddPCR, Western blot, etc. To test candidate activation domains, increased expression of the target gene is quantified by these methods. Truncations and mutations can be introduced into the effector domain to generate multiple variants for testing.

[0504] Testing DNA methyltransferase domains: To test the functionality of candidate DNA methyltransferase domains, the domain is fused to a DNA-binding domain for testing in human cells. The effector domain, identified and extracted from the full protein sequence may be fused to the N-terminal or C-terminal end of any DNA-binding domain, using a variety of linkers. For example, a DNA methyltransferase domain may be fused to Cas9. This fusion protein is then co-delivered into cells, along with a gRNA, using standard cell culture techniques. This may include plasmid transfection or electroporation, mRNA transfection or electroporation, or viral transduction. Because DNA methylation is expected to reduce target gene expression, this may be assayed by standard techniques such as RT-qPCR, staining for cell surface marker and quantifying by flow cytometry, ddPCR and Western blotting. Additionally, direct readout of DNA methylation is obtained through bisulfite sequencing. In this method, bisulfite treatment of DNA converts cytosine residues to uracil but leaves 5-methylcytosine residues unaffected. Standard Sanger sequencing or next-generation sequencing can then be performed to determine the rate of methylation at CpG dinucleotides.

Testing DNA demethylation domains: To test the functionality of candidate domains for removing DNA methylation, the domain is fused to a DNA-binding domain for testing in human cells. The effector domain, identified and extracted from the full protein sequence may be fused to the N-terminal or C-terminal end of any DNA-binding domain, using a variety of linkers. For example, a domain may be fused to Cas9. This fusion protein is then co-delivered into cells, along with a gRNA, using standard cell culture techniques. This may include plasmid transfection or electroporation, mRNA transfection or electroporation, or viral transduction. Because removal of DNA methylation marks at CpG dinucleotides is expected to increase target gene expression, this may be assayed by standard techniques such as RT-qPCR, staining for cell surface marker and quantifying by flow cytometry, ddPCR and Western blotting. Additionally, direct readout of DNA methylation is obtained through bisulfite sequencing. In this method, bisulfite treatment of DNA converts cytosine residues to uracil but leaves 5-methylcytosine residues unaffected. Standard Sanger sequencing or next-generation sequencing can then be performed to determine the rate of methylation at CpG dinucleotides.

### Example 5: Alternate DNMT Effectors and Effector Fusions

[0505] GripTite293 cells were seeded in 96-well plates and transfected with 25 ng of a gRNA-expressing plasmid (targeting VIM), 50 ng of an Effector-DBD fusion plasmid, and 5 ng of a Puromycin resistance plasmid using Mirus TransIT transfection reagent. VIM-targeting gRNAs used can be found in SEQ ID NO.: 962-969. Effector-DBD fusions can be found in SEQ ID NO.: 1092-1133.

[0506] At day 1 post transfection, cells were cultured with Puromycin to select for positively transfected cells. At day 6 or day 7 post transfection, cells were analyzed for VIM expression via FACS (FIG. 2).

[0507] When human-human and human-mouse fusions were tested against plant DNMT effectors and effector fusions, the mammalian fusions exhibited greateer VIM silencing (FIG. 3A); similar results were found when the mammalian fusions were compared to DNMT effectors and effector fusions from bacteria, fungi, and Drosophila (FIG. 3B).

### Example 6: Alternate KRAB and Non-KRAB Repressors

[0508] GripTite293 cells were seeded in 96-well plates and transfected with 25 ng of a gRNA-expressing plasmid (targeting VIM), 50 ng of a DBD-Effector fusion plasmid, and 5 ng of a Puromycin resistance plasmid using Mirus TransIT transfection reagent. VIM-targeting gRNAs used can be found in SEQ ID NO.: 962-969. DBD-Effector fusions can be found in SEQ ID NO.: 1002-1091.

[0509] At day 1 post transfection, cells were cultured with Puromycin to select for positively transfected cells. At day 6 post transfection, cells were analyzed for VIM expression via FACS (FIG. 5). Many alternate KRAB and non-KRAB repressors effectively silenced VIM expression.

### Example 7: Gene Repression

[0510] GripTite293 cells were seeded in 96-well plates and transfected with 25 ng of a gRNA-expressing plasmid (either single gRNA or 4× (quad) gRNA plasmid targeting CD151 or CLTA), 50 ng of a DBD-Effector fusion plasmid, and 5 ng of a Puromycin resistance plasmid using Mirus TransIT transfection reagent. CD151-targeting gRNAs used can be found in SEQ ID NO.: 970-977. DBD-Effector fusion plasmids used can be found in SEQ ID NO.: 978-1001.

[0511] At day 1 post transfection, cells were cultured with Puromycin to select for positively transfected cells. At day 6 post transfection, cells were analyzed for CD151 or CLTA expression via FACS. FIG. 6-7 show that many of the alternate KRAB combination effectively silence CD151.

[0512] While preferred embodiments of the present disclosure have been shown and described herein, it will be obvious to those skilled in the art that such embodiments are provided by way of example only. Numerous variations, changes, and substitutions will now occur to those skilled in the art without departing from the disclosure. It should be understood that various alternatives to the embodiments of the disclosure described herein may be employed in practicing the disclosure. It is intended that the following claims define the scope of the disclosure and that methods and structures within the scope of these claims and their equivalents be covered thereby.

### Other Embodiments

[0513] From the foregoing description, it will be apparent that variations and modifications may be made to the disclosure described herein to adopt it to various usages and conditions. Such embodiments are also within the scope of the following claims.

[0514] The recitation of a listing of elements in any definition of a variable herein includes definitions of that variable as any single element or combination (or subcombination) of listed elements. The recitation of an embodiment herein includes that embodiment as any single embodiment, any portion of the embodiment, or in combination with any other embodiments or any portion thereof.

[0515] As is set forth herein, it will be appreciated that the disclosure comprises specific embodiments and examples of base editing systems to effect a nucleobase alteration in a gene and methods of using same for treatment of disease including compositions that comprise such base editing systems, designs and modifications thereto; and specific examples and embodiments describing the synthesis, manufacture, use, and efficacy of the foregoing individually and in combination including as pharmaceutical compositions for treating disease and for in vivo and in vitro delivery of active agents to mammalian cells under described conditions.

[0516] While specific examples and numerous embodiments have been provided to illustrate aspects and combinations of aspects of the foregoing, it should be appreciated and understood that any aspect, or combination thereof, of an exemplary or disclosed embodiment may be excluded therefrom to constitute another embodiment without limitation and that it is contemplated that any such embodiment can constitute a separate and independent claim. Similarly, it should be appreciated and understood that any aspect or combination of aspects of one or more embodiments may also be included or combined with any aspect or combination of aspects of one or more embodiments and that it is contemplated herein that all such combinations thereof fall within the scope of this disclosure and can be presented as separate and independent claims without limitation. Accordingly, it should be appreciated that any feature presented in one claim may be included in another claim; any feature presented in one claim may be removed from the claim to constitute a claim without that feature; and any feature presented in one claim may be combined with any feature in another claim, each of which is contemplated herein. The following enumerated clauses are further illustrative examples of aspects and combination of aspects of the foregoing embodiments and examples:
[0517] 1. A method of modifying an epigenetic state of a target gene in a target chromosome, the method comprising contacting the target chromosome with an epigenetic editor, wherein the epigenetic editor comprises a DNA binding domain and an epigenetic effector domain, wherein the DNA binding domain binds to a target sequence in the target chromosome and directs the epigenetic effector domain to effect a site-specific epigenetic modification in the target gene or a histone bound to the target gene in the target chromosome, thereby modifying the epigenetic state of the target gene.
[0518] 2. A method of modulating expression of a target gene in a target chromosome in a cell, the method comprising contacting the target gene with an epigenetic editor, wherein the epigenetic editor comprises a DNA binding domain and an epigenetic effector domain, wherein the DNA binding domain binds to a target sequence in the target chromosome and directs the epigenetic effector domain to effect a site-specific epigenetic modification in the target gene or a histone bound to the target gene, thereby modulating expression of the target gene.
[0519] 3. A method of treating a disease in a subject in need thereof, the method comprising administering to the subject an epigenetic editor, wherein the epigenetic editor comprises a DNA binding domain and an epigenetic effector domain, wherein the DNA binding domain binds to a target sequence in a target chromosome comprising a target gene in the subject and directs the epigenetic effector domain to effect a site-specific epigenetic modification in the target gene or a histone bound to the target gene, wherein the target gene is associated with disease and wherein the site-specific epigenetic modification modulates expression of the target gene, thereby treating the disease.
[0520] 4. The method of any one of the preceding claims, wherein the site-specific epigenetic modification is within 3000 base pairs upstream or downstream of the target sequence.
[0521] 5. The method of claim 4, wherein the site-specific epigenetic modification is within 2000 base pairs upstream or downstream of the target sequence.
[0522] 6. The method of any one of the preceding claims, wherein the site-specific epigenetic modification is within 3000 base pairs upstream or downstream of an expression regulatory sequence.
[0523] 7. The method of claim 6, wherein the site-specific epigenetic modification is within 2000 base pairs upstream or downstream of the expression regulatory sequence.
[0524] 8. The method of claim 7, wherein the site-specific epigenetic modification is within 1000 base pairs upstream or downstream of the expression regulatory sequence.
[0525] 9. A method of modifying an epigenetic state of a target gene in a target chromosome, the method comprising contacting the target gene with an epigenetic editor, wherein the epigenetic editor comprises a DNA biding domain and an epigenetic effector domain, wherein the DNA biding domain binds to a target sequence in the target chromosome, and wherein the epigenetic effector domain results in an epigenetic modification in at least 10% of all nucleotides or all histone tails bound with nucleotides within 200 base pairs upstream or downstream of the target sequence in the target genome.
[0526] 10. A method of modulating expression of a target gene in a target chromosome in a cell, the method comprising contacting the target gene with an epigenetic editor, wherein the epigenetic editor comprises a DNA binding domain and an epigenetic effector domain, wherein the DNA binding domain binds to a target sequence in the target chromosome, and wherein the epigenetic effector domain results in an epigenetic modification in at least 10% of all nucleotides or all histone tails bound with nucleotides within 200 base pairs upstream or downstream of the target sequence in a target genome in the cell.
[0527] 11. A method of treating a disease in a subject in need thereof, the method comprising administering to the subject an epigenetic editor, wherein the epigenetic editor comprises a DNA binding domain and an epigenetic effector domain, wherein the DNA binding domain binds to a target sequence in a target chromosome comprising a target gene in the subject, wherein the epigenetic effector domain results in an epigenetic modification in at least 10% of all nucleotides or at least 10% of all histone tails bound with nucleotides within 200 base pairs upstream or downstream of the target sequence in a target genome in the subject, wherein the target gene is associated with the disease and wherein the epigenetic modification modulates expression of the target gene, thereby treating the disease.
[0528] 12. The method of any one of claims 9-11, wherein the epigenetic effector domain results in the epigenetic modification in at least 20% of all nucleotides within 200 base pairs upstream or downstream of the target sequence.
[0529] 13. The method of any one of claims 9-11, wherein the epigenetic effector domain results in the epigenetic modification in at least 50% of all nucleotides within 200 base pairs upstream or downstream of the target sequence.
[0530] 14. The method of any one of claims 9-11, wherein the epigenetic effector domain results in the epigenetic modification in at least 10% of all nucleotides within 500 base pairs upstream or downstream of the target sequence.
[0531] 15. The method of any one of claims 9-11, wherein the epigenetic effector domain results in the epigenetic modification in at least 20% of all nucleotides within 500 base pairs upstream or downstream of the target sequence.
[0532] 16. A method of modifying an epigenetic state of a target gene in a target chromosome, the method comprising contacting the target gene with an epigenetic editor, wherein the epigenetic editor comprises a DNA biding domain and an epigenetic effector domain, wherein the DNA biding domain binds to a target sequence in the target chromosome, and wherein the epigenetic effector domain results in an epigenetic modification in at least 10% of all CpG dinucleotides within 200 base pairs upstream or downstream of the target sequence in the target genome.
[0533] 17. A method of modulating expression of a target gene in a target chromosome in a cell, the method comprising contacting the target gene with an epigenetic editor, wherein the epigenetic editor comprises a DNA binding domain and an epigenetic effector domain, wherein the DNA binding domain binds to a target sequence in the target chromosome, and wherein the epigenetic effector domain results in an epigenetic modification in at least 10% of all CpG dinucleotides within 200 base pairs upstream or downstream of the target sequence in a target genome in the cell.
[0534] 18. A method of treating a disease in a subject in need thereof, the method comprising administering to the subject an epigenetic editor, wherein the epigenetic editor comprises a DNA binding domain and an epigenetic effector domain, wherein the DNA binding domain binds to a target sequence in a target chromosome comprising a target gene in the subject, wherein the epigenetic effector domain results in an epigenetic modification in at least 10% of all CpG dinucleotides within 200 base pairs upstream or downstream of the target sequence in a target genome in the subject, wherein the target gene is associated with disease and wherein the epigenetic modification modulates expression of the target gene, thereby treating the disease.
[0535] 19. The method of any one of claims 16-18, wherein the epigenetic effector domain results in the epigenetic modification in at least 20% of all CpG dinucleotides within 200 base pairs upstream or downstream of the target sequence.
[0536] 20. The method of any one of claims 16-18, wherein the epigenetic effector domain results in the epigenetic modification in at least 50% of all CpG dinucleotides within 200 base pairs upstream or downstream of the target sequence.
[0537] 21. The method of any one of claims 16-18, wherein the epigenetic effector domain results in the epigenetic modification in at least 10% of all CpG dinucleotides within 500 base pairs upstream or downstream of the target sequence.
[0538] 22. The method of any one of claims 16-18, wherein the epigenetic effector domain results in the epigenetic modification in at least 20% of all CpG dinucleotides within 500 base pairs upstream or downstream of the target sequence.
[0539] 23. The method of any one of claims 16-18, wherein the epigenetic effector domain results in the epigenetic modification in at least 80% of all CpG dinucleotides within 200 base pairs upstream or downstream of the target sequence.
[0540] 24. The method of any one of claims 9-14, wherein the epigenetic effector domain results in the epigenetic modification in at least 50% of all nucleotides within 500 base pairs upstream or downstream of an expression regulatory sequence.
[0541] 25. The method of any one of claims 3-8 or 11-24, comprising administering to the subject a cell comprising the epigenetic editor.
[0542] 26. The method of claim 25, wherein the cell is an allogeneic cell.
[0543] 27. The method of claim 25, wherein the cell is an autologous cell.
[0544] 28. The method of any one of claims 6-8 or 15-27, wherein the expression regulatory sequence comprises a promoter.
[0545] 29. The method of any one of claims 6-8 or 15-27, wherein the expression regulatory sequence comprises a transcription initiation start site.
[0546] 30. The method of any one of claims 6-8 or 15-27, wherein the expression regulatory sequence comprises an enhancer.
[0547] 31. The method of any one of the preceding claims, wherein the epigenetic modification is within a coding region of the target gene.
[0548] 32. The method of any one of the preceding claims, wherein the target gene comprises an allele associated with a disease.
[0549] 33. The method of any one of the preceding claims, wherein the target gene comprises two heterozygotic copies.
[0550] 34. The method of claim 33, wherein the target gene is heterozygous at an allele.
[0551] 35. The method of claim 33 or 34, wherein the epigenetic modification is at one of the two heterozygotic copies and not the other.
[0552] 36. The method of claim 34, wherein the epigenetic modification is at the heterozygotic allele.
[0553] 37. The method of any one of the preceding claims, wherein the DNA binding domain comprises a zinc finger motif.
[0554] 38. The method of any one of the preceding claims, wherein the DNA binding domain comprises a zinc finger array.
[0555] 39. The method of claim 38, wherein the zinc finger array comprises at least six zinc fingers.
[0556] 40. The method of claim 39, wherein the zinc finger array comprises at least three subsets of zinc fingers each comprising at least two zinc fingers.
[0557] 41. The method of any one of claims 1-36, wherein the DNA binding domain comprises a nucleic acid guided DNA binding domain bound to a guide polynucleotide.
[0558] 42. The method of claim 41, wherein the DNA binding domain comprises CRISPR-Cas protein bound to the guide polynucleotide.
[0559] 43. The method of claim 41, wherein the guide polynucleotide hybridizes with the target sequence.
[0560] 44. The method of claim 41, wherein the CRISPR-Cas protein comprises a nuclease inactive Cas9 (dCas9).
[0561] 45. The method of claim 41, wherein the CRISRP-Cas protein comprises a nuclease inactive Cas12a (dCas12a) or a nuclease inactive CasX (dCasX).
[0562] 46. The method of any one of the preceding claims, wherein the epigenetic effector domain results in reduced or silenced expression of the target gene as compared to a control cell not contacted with the epigenetic editor.
[0563] 47. The method of claim 46, wherein the epigenetic effector domain specifically reduces or silences expression from one of the heterozygotic copies of the target gene as compared to a control gene in a cell not contacted with the epigenetic editor.
[0564] 48. The method of claim 46 or 47, wherein the site-specific epigenetic modification or the epigenetic modification comprises DNA methylation.
[0565] 49. The method of claim 48, wherein the site-specific epigenetic modification or the epigenetic modification is in a CpG dinucleotide.
[0566] 50. The method of claim 48, wherein the CpG dinucleotide is in a CpG island.
[0567] 51. The method of claim 48, wherein the CpG dinucleotide is not in a CpG island.
[0568] 52. The method of claim 46 or 47, wherein the site-specific epigenetic modification or the epigenetic modification comprises de-acetylation of the histone bound to the target gene.
[0569] 53. The method of claim 46 or 47, wherein the site-specific epigenetic modification or the epigenetic modification comprises methylation of the histone bound to the target gene, optionally wherein the methylation of the histone is H3K9 methylation.
[0570] 54. The method of claim 46 or 47, wherein the site-specific epigenetic modification comprises demethylation of the histone bound to the target gene, optionally wherein the demethylation of the histone is H3K4 demethylation.
[0571] 55. The method of any one of claims 46-54, wherein the epigenetic effector domain comprises a DNA methyltransferase domain.
[0572] 56. The method of claim 55, wherein the epigenetic effector domain comprises a Dnmt1 domain, a Dnmt3A domain, a Dnmt3L domain, or a Dnmt3B domain.
[0573] 57. The method of claim 56, wherein the epigenetic effector domain comprises a Dnmt3A-Dnmt3L fusion protein.
[0574] 58. The method of any one of claims 46-55, wherein the epigenetic effector domain comprises transcription repressor, a DNA methyltransferase, a histone methyltransferase, a histone demethylase, a histone deacetylase, or any combination thereof.
[0575] 59. The method of any one of claims 46-55, wherein the epigenetic effector domain recruits a transcription repressor, a DNA methyltransferase, a histone methyltransferase, a histone demethylase, a histone deacetylase, or any combination thereof to the target gene.
[0576] 60. The method of claim 58 or 59, wherein the epigenetic effector domain comprises a KRAB domain, a KAP1 domain, a MECP2 domain, a chromoshadow domain, or a HP1 domain.
[0577] 61. The method of any one of claims 58-59, wherein the epigenetic effector domain comprises a protein from Table 2 or Table 3.
[0578] 62. The method of any one of claims 46-61, wherein the epigenetic editor further comprises a second epigenetic effector domain that results in reduced or silenced expression of the target gene.
[0579] 63. The method of claim 62, wherein the second epigenetic effector domain comprises a DNA methyltransferase domain.
[0580] 64. The method of claim 62, wherein the second epigenetic effector domain comprises a transcription repressor, a DNA methyltransferase, a histone methyltransferase, a histone demethylase, a histone deacetylase, or any combination thereof.
[0581] 65. The method of claim 62, wherein the second epigenetic effector domain recruits a transcription repressor, a DNA methyltransferase, a histone methyltransferase, a histone demethylase, a histone deacetylase, or any combination thereof to the target gene.
[0582] 66. The method of claim 62, wherein the second epigenetic effector domain comprises a KRAB domain, a KAP1 domain, a HP1 domain, a Dnmt3A domain, a Dnmt3L domain, or any combination thereof.
[0583] 67. The method of claim 62, wherein the second epigenetic effector domain comprises a protein of Table 2 or Table 3.
[0584] 68. The method of any one of claims 62-67, wherein the epigenetic effector domain and the second epigenetic effector domain synergistically reduces or silences expression of the target gene.
[0585] 69. The method of any one of claims 46-68, wherein the epigenetic editor comprises a DNA methyltransferase domain and a repression domain that reduces or silences expression of the target gene.
[0586] 70. The method of any one of claims 46-68, wherein the epigenetic editor comprises a DNA methyltransferase domain and a repression scaffold protein domain that recruits transcription repressor proteins to the target gene.
[0587] 71. The method of any one of claims 46-68, wherein the epigenetic editor comprises a DNA methyltransferase domain and a histone deacetylase domain.
[0588] 72. The method of claim 71, wherein the epigenetic editor further comprises a KRAB domain, a KAP1 domain, a HP1 domain, a chromoshadow domain, or a MECP2 domain.
[0589] 73. The method of any one of claim 46-72, wherein the epigenetic editor comprises from N terminus to C terminus: (i) a Dnmt3A-Dnmt3L fusion protein domain, (ii) the DNA binding domain, and (iii) a KRAB domain, a KAP1 domain, a HP1 domain, or a MECP2 domain.
[0590] 74. The method of any one of claim 46-72, wherein the epigenetic editor comprises from N terminus to C terminus the (i) a KRAB domain, a KAP1 domain, a HP1 domain, or a MECP2 domain, (ii) the DNA binding domain, and (iii) Dnmt3A-Dnmt3L fusion protein domain.
[0591] 75. The method of claim 73 or 74, wherein the Dnmt3A-Dnmt3L fusion protein domain comprises from N terminus to C terminus: Dnmt3A-Dnmt3L.
[0592] 76. The method of claim 73 or 74, wherein the Dnmt3A-Dnmt3L fusion protein domain comprises from N terminus to C terminus: Dnmt3L-Dnmt3A.
[0593] 77. The method of any one of claims 46-76, wherein the epigenetic editor reduces expression of the target gene by at least 50% as compared to a wild-type expression level.
[0594] 78. The method of any one of claims 46-77, wherein the reduction in expression of the target gene is maintained for at least 1 week, 4 weeks, 6 months, or 1 year.
[0595] 79. The method of any one of claims 46-78, wherein the reduction in expression of the target gene is maintained in offspring cells derived from a cell comprising the target gene.
[0596] 80. The method of any one of claims 1-45, wherein the epigenetic editor comprises an epigenetic effector domain that increases expression of the target gene as compared to a control gene in a cell not contacted with the epigenetic editor.
[0597] 81. The method of claim 80, wherein the site-specific epigenetic modification or the epigenetic modification comprises DNA demethylation.
[0598] 82. The method of claim 80 or 81, wherein the site-specific epigenetic modification or the epigenetic modification is in a CpG dinucleotide.
[0599] 83. The method of claim 82, wherein the CpG dinucleotide is in a CpG island.
[0600] 84. The method of claim 82, wherein the CpG dinucleotide is not in a CpG island.
[0601] 85. The method of claim 83, wherein the site-specific epigenetic modification or the epigenetic modification comprises acetylation of the histone bound to the target gene.
[0602] 86. The method of claim 80, wherein the site-specific epigenetic modification or the epigenetic modification comprises methylation of the histone bound to the target gene, optionally wherein the methylation of the histone is H3K4 methylation.
[0603] 87. The method of claim 80, wherein the site-specific epigenetic modification comprises demethylation of the histone bound to the target gene, optionally wherein the demethylation of the histone is H3K9 demethylation.
[0604] 88. The method of any one of claims 80-87, wherein the epigenetic effector domain comprises a DNA demethylase domain.
[0605] 89. The method of claim 88, wherein the DNA demethylase domain comprises a TET family protein domain.
[0606] 90. The method of claim 89, wherein the DNA demethylase domain comprises a TET1 protein.
[0607] 91. The method of claim 88, wherein the epigenetic effector domain comprises a histone acetylase domain.
[0608] 92. The method of any one of claims 80-87, wherein the epigenetic effector domain comprises a transcription activator, a DNA demethylase, a histone methyltransferase, a histone demethylase, a histone acetylase, or any combination thereof.
[0609] 93. The method of any one of claims 80-87, wherein the epigenetic effector domain recruits a transcription activator, a DNA demethylase, a histone methyltransferase, a histone demethylase, a histone acetylase, or any combination thereof to the target gene.
[0610] 94. The method of claim 92 or 93, wherein the epigenetic effector domain comprises a VP16 domain, a VP64 domain, a p65 domain, or a RTA domain.
[0611] 95. The method of any one of claims 80-87, wherein the epigenetic effector domain comprises a protein from Table 5 or Table 6.
[0612] 96. The method of any one of claims 80-95, wherein the epigenetic editor further comprises a second epigenetic effector domain that increases expression of the target gene.
[0613] 97. The method of claim 96, wherein the second epigenetic effector domain comprises a DNA demethylase domain.
[0614] 98. The method of claim 96, wherein the second epigenetic effector domain comprises a transcription activator, a DNA demethylase, a histone methyltransferase, a histone demethylase, a histone acetylase, or any combination thereof.
[0615] 99. The method of claim 96, wherein the second epigenetic effector domain recruits a transcription activator, a DNA demethylase, a histone methyltransferase, a histone demethylase, a histone acetylase, or any combination thereof.
[0616] 100. The method of claim 98 or 99, wherein the second epigenetic effector domain comprises a TET1 domain, a VP16 domain, a VP64 domain, a p65 domain, a RTA domain, or any combination thereof.
[0617] 101. The method of claim 96, wherein the second epigenetic effector domain comprises a protein form Table 5 or Table 6.
[0618] 102. The method of any one of claims 80-101, wherein the epigenetic editor comprises a DNA demethylase domain and a fusion of a VP64 domain, a p65 domain, and a RTA domain.
[0619] 103. The method of any one of claim 80-102, wherein the epigenetic editor increases expression of the target gene by at least 50% as compared to a wild-type expression level.
[0620] 104. The method of claim 80-103, wherein the increase in expression of the target gene expression is maintained for at least 1 week, 4 weeks, 6 months, or 1 year.
[0621] 105. The method of any one of claims 80-104, wherein the increase in expression of the target gene is maintained in offspring cells derived from a cell comprising the target gene.
[0622] 106. The method of any one of the preceding claims, wherein the epigenetic editor further comprises a second DNA binding domain that binds to a second target sequence in a second target gene, and wherein the DNA binding domain directs the epigenetic effector domain to effect an epigenetic modification in the second target gene or a histone bound to the second target gene.
[0623] 107. The method of any one of claims 41-106, wherein the epigenetic editor further comprises a second guide polynucleotide that binds to the DNA binding domain and hybridizes with a second target sequence in a second target gene and directs the epigenetic editor to effect an epigenetic modification in the second target gene or a histone bound to the second target gene.
[0624] 108. The method of claim 106 or 107, wherein the second target gene is the same as the target gene.
[0625] 109. The method of claim 108, wherein the second target sequence overlaps with the target sequence.
[0626] 110. The method of claim 108, wherein the second target sequence is within 1000 base pairs upstream or downstream of the target sequence.
[0627] 111. The method of claim 108, wherein the second target sequence is within 500 base pairs upstream or downstream of the target sequence.
[0628] 112. The method of claim 106 or 107, wherein the second target gene is different from the target gene.
[0629] 113. The method of claim 112, wherein the target gene and the second target gene are associated with in a same metabolic pathway or function.
[0630] 114. The method of claim 112, wherein the target gene and the second target gene are associated with a same disease or condition.
[0631] 115. The method of any one of the preceding claims, wherein the epigenetic editor further comprises a linker.
[0632] 116. The method of claim 115, wherein the linker is a peptide linker.
[0633] 117. The method of claim 116, wherein the linker comprises an XTEN linker.
[0634] 118. The method of any one of the preceding claims, wherein the contacting is ex vivo.
[0635] 119. The method of any one of claims 1-114, wherein the contacting is in vivo in a subject.
[0636] 120. The method of claim 119, wherein the subject is a human.
[0637] 121. An epigenetically modified chromosome comprising a gene of interest (GOI), wherein at least 10% of all nucleotides or at least 10% of all histone tails bound with nucleotides within 200 base pairs upstream or downstream of an expression regulatory sequence of the GOI comprise an epigenetic modification as compared to an unmodified control chromosome comprising the gene of interest.
[0638] 122. The epigenetically modified chromosome of claim 121, wherein at least 20% of all nucleotides within 200 base pairs upstream or downstream of the expression regulatory sequence comprise the epigenetic modification as compared to an unmodified control chromosome comprising the gene of interest.
[0639] 123. The epigenetically modified chromosome of claim 121, wherein at least 50% of all nucleotides within 200 base pairs upstream or downstream of the expression regulatory sequence comprise the epigenetic modification as compared to an unmodified control chromosome comprising the gene of interest 124. The epigenetically modified chromosome of claim 121, wherein at least 10% of all nucleotides within 500 base pairs upstream or downstream of the expression regulatory sequence comprise the epigenetic modification as compared to an unmodified control chromosome comprising the gene of interest.
[0640] 125. The epigenetically modified chromosome of claim 115, wherein the at least 20% of all nucleotides within 500 base pairs upstream or downstream of the expression regulatory sequence comprise the epigenetic modification as compared to an unmodified control chromosome comprising the gene of interest.
[0641] 126. An epigenetically modified chromosome comprising a gene of interest (GOI), wherein at least 10% of all CpG dinucleotides within 200 base pairs upstream or downstream of an expression regulatory sequence of the GOI comprise an epigenetic modification as compared to an unmodified control chromosome comprising the gene of interest.
[0642] 127. The epigenetically modified chromosome of claim 126, wherein at least 20% of all CpG dinucleotides within 200 base pairs upstream or downstream of the expression regulatory sequence comprise the epigenetic modification as compared to an unmodified control chromosome comprising the gene of interest.
[0643] 128. The epigenetically modified chromosome of claim 126, wherein at least 50% of all CpG dinucleotides within 200 base pairs upstream or downstream of the expression regulatory sequence comprise the epigenetic modification as compared to an unmodified control chromosome comprising the gene of interest.
[0644] 129. The epigenetically modified chromosome of claim 126, wherein at least 10% of all CpG dinucleotides within 500 base pairs upstream or downstream of the expression regulatory sequence comprise the epigenetic modification as compared to an unmodified control chromosome comprising the gene of interest.
[0645] 130. The epigenetically modified chromosome of claim 126, wherein at least 20% of all CpG dinucleotides within 500 base pairs upstream or downstream of the expression regulatory sequence comprise the epigenetic modification as compared to an unmodified control chromosome comprising the gene of interest.
[0646] 131. The epigenetically modified chromosome of any one of claims 126-130, wherein the CpG dinucleotides comprising the epigenetic modification are in a CpG island.
[0647] 132. the epigenetically modified chromosome of any one of claims 126-130, wherein the CpG dinucleotides comprising the epigenetic modification are not in a CpG island.
[0648] 133. The epigenetically modified chromosome of any one of claims 121-132, wherein the expression regulatory sequence comprises a promoter.
[0649] 134. The epigenetically modified chromosome of any one of claims 121-132, wherein the expression regulatory sequence comprises a transcription start site.
[0650] 135. The epigenetically modified chromosome of any one of claims 121-132, wherein the expression regulatory sequence comprises an enhancer.
[0651] 136. The epigenetically modified chromosome of any one of claims 121-135, wherein the epigenetic modification is within a coding region of the GOI.
[0652] 137. The epigenetically modified chromosome of any one of claims 121-136, wherein the target gene comprises an allele associated with a disease.
[0653] 138. The epigenetically modified chromosome of any one of claims 121-136, wherein the target gene comprises two heterozygotic copies.
[0654] 139. The epigenetically modified chromosome of any one of claims 121-137, wherein the target gene is heterozygous at an allele.
[0655] 140. The epigenetically modified chromosome of claim 139, wherein the epigenetic modification is at one of the two heterozygotic copies and not the other.
[0656] 141. The epigenetically modified chromosome of claim 140, wherein the epigenetic modification is at the heterozygotic allele.
[0657] 142. The epigenetically modified chromosome of any one of claims 121-140, wherein the epigenetically modified chromosome is in a cell.
[0658] 143. The epigenetically modified chromosome of claim 141, wherein the epigenetic modification results in reduced or silenced expression of the GOI as compared to the GOI in an unmodified control chromosome in a control cell.
[0659] 144. The epigenetically modified chromosome of claim 143, wherein the epigenetic modification comprises DNA methylation.
[0660] 145. The epigenetically modified chromosome of claim 143, wherein the epigenetic modification comprises de-acetylation of the histone tails.
[0661] 146. The epigenetically modified chromosome of claim 143, wherein the site-specific epigenetic modification or the epigenetic modification comprises methylation of the histone bound to the target gene, optionally wherein the methylation of the histone is H3K9 methylation.
[0662] 147. The epigenetically modified chromosome of claim 143, wherein the site-specific epigenetic modification comprises demethylation of the histone bound to the target gene, optionally wherein the demethylation of the histone is H3K4 demethylation.
[0663] 148. The epigenetically modified chromosome of any one of claims 143-147, wherein the expression of the GOI is reduced by at least 50% as compared to a wild-type expression level.
[0664] 149. The epigenetically modified chromosome of claim, wherein the reduction in expression of the GOI is maintained for at least 1 week, 4 weeks, 6 months, or 1 year.
[0665] 150. The epigenetically modified chromosome any one of claims 143-149, wherein the reduction in expression of the GOI is maintained in offspring cells derived from the cell.
[0666] 151. The epigenetically modified chromosome of claim 141, wherein the epigenetic modification results in increased expression of the GOI as compared to the GOI in an unmodified control chromosome in a control cell.
[0667] 152. The epigenetically modified chromosome of claim 151, wherein the epigenetic modification comprises DNA demethylation.
[0668] 153. The epigenetically modified chromosome of claim 151, wherein the epigenetic modification comprises acetylation of the histone tails.
[0669] 154. The epigenetically modified chromosome of claim 151, wherein the epigenetic modification comprises methylation of the histone tails, optionally wherein the methylation of the histone is H3K4 methylation.
[0670] 155. The epigenetically modified chromosome of claim 151, wherein the epigenetic modification comprises demethylation of the histone tails, optionally wherein the demethylation of the histone is H3K9 demethylation.
[0671] 156. The epigenetically modified chromosome any one of claims 151-155, wherein the expression of the GOI is increased by at least 50% as compared to a wild-type expression level.
[0672] 157. The epigenetically modified chromosome any one of claims 151-156, wherein the increase in expression of the GOI is maintained for at least 1 week, 4 weeks, 6 months, or 1 year.
[0673] 158. The epigenetically modified chromosome of any one of claims 151-157, wherein the increase in expression of the GOI is maintained in offspring cells derived from the cell.
[0674] 159. A cell comprising the epigenetically modified chromosome of any one of claims 121-158.
[0675] 160. The cell of claim 159, wherein the cell is a non-dividing cell.
[0676] 161. The cell of claim 159, wherein the cell is a primary cell.
[0677] 162. The cell of claim 159, wherein the cell is a mammalian cell.
[0678] 163. The cell of claim 159, wherein the cell is a human cell.
[0679] 164. The epigenetically modified chromosome of any one of claims 121-158, wherein the epigenetically modified chromosome is in a subject.
[0680] 165. The epigenetically modified chromosome of claim 164, wherein the subject is a human.
[0681] 166. An epigenetic editor that comprises a DNA binding domain, a DNA methylation regulatory protein, and an affinity domain, wherein the DNA binding domain binds to a target sequence in a target chromosome comprising a target gene, wherein the affinity domain specifically binds to an epigenetic effector protein in a cell comprising the target gene and directs the epigenetic effector protein to the target gene to effect an epigenetic modification in a nucleotide in the target gene or a histone bound to the target gene when contacted with the target chromosome.
[0682] 167. An epigenetic editor that comprises a DNA binding domain, an epigenetic effector protein, and an affinity domain, wherein the DNA binding domain binds to a target sequence in a target chromosome comprising a target gene, wherein the affinity domain specifically binds to a DNA methylation regulatory protein in a cell comprising the target gene and directs the DNA methylation regulatory protein to the target gene to effect an epigenetic modification in a nucleotide in the target gene.
[0683] 168. The epigenetic editor of claim 166 or 167, wherein the DNA methylation regulatory protein comprises a DNA methyltransferase domain.
[0684] 169. The epigenetic editor of claim 168, wherein the DNA methyltransferase domain comprises a Dnmt1 domain, a Dnmt3A domain, a Dnmt3L domain, or a Dnmt3B domain.
[0685] 170. The epigenetic editor of claim 168, wherein the DNA methyltransferase domain comprises a Dnmt3A-Dnmt3L fusion.
[0686] 171. The epigenetic editor of any one of claims 166-170, wherein the epigenetic effector protein results in decreased or silenced expression of the target gene as compared to the target gene not contacted with the epigenetic editor.
[0687] 172. The epigenetic editor of any one of claims 166-171, wherein the epigenetic effector protein comprises a histone deacetylase.
[0688] 173. The epigenetic editor of any one of claims 166-171, wherein the epigenetic effector protein comprises a transcription repressor, a DNA methyltransferase, a histone methyltransferase, a histone demethylase, a histone deacetylase, or any combination thereof.
[0689] 174. The epigenetic editor of any one of claims 166-171, wherein the epigenetic effector protein recruits a transcription repressor, a DNA methyltransferase, a histone methyltransferase, a histone demethylase, a histone deacetylase, or any combination thereof in the cell to the target gene.
[0690] 175. The epigenetic editor of any one of claims 166-171, wherein the epigenetic effector protein comprises a KRAB protein, a KAP1 protein, a MECP2 protein, or a HP1 protein.
[0691] 176. The epigenetic editor of any one of claims 166-171, wherein the epigenetic effector protein comprises a protein from Table 2 or Table 3.
[0692] 177. The epigenetic editor of any one of claim 166 or 168-175, wherein the epigenetic editor comprises a Dnmt3A-Dnm3L fusion protein domain and the affinity domain that specifically binds to KAP1.
[0693] 178. The epigenetic editor of any one of claim 166 or 168-175, wherein the epigenetic editor comprises a Dnmt3A-Dnm3L fusion protein domain and the affinity domain that specifically binds to KRAB.
[0694] 179. The epigenetic editor of any one of claim 166 or 168-175, wherein the epigenetic editor comprises a Dnmt3A-Dnm3L fusion protein domain and the affinity domain that specifically binds to MECP2.
[0695] 180. The epigenetic editor of any one of claim 166 or 168-175, wherein the epigenetic editor comprises a Dnmt3A-Dnm3L fusion protein domain and the affinity domain that specifically binds to HP1.
[0696] 181. The epigenetic editor of any one of claim 166 or 168-175, wherein the epigenetic editor comprises a Dnmt3A-Dnm3L fusion protein domain and the affinity domain that specifically binds to a chromoshadow domain.
[0697] 182. The epigenetic editor of any one of claims 177-181, wherein the epigenetic editor comprises from N terminus to C terminus: (i) the Dnmt3A-Dnmt3L fusion protein domain, (ii) the DNA binding domain, and (iii) the affinity domain.
[0698] 183. The epigenetic editor of any one of claims 177-181, wherein the epigenetic editor comprises from N terminus to C terminus (i) the affinity domain, (ii) the DNA binding domain, and (iii) the Dnmt3A-Dnmt3L fusion protein domain.
[0699] 184. The epigenetic editor of any one of claims 177-183, wherein the Dnmt3A-Dnmt3L fusion protein domain comprises from N terminus to C terminus: Dnmt3A-Dnmt3L.
[0700] 185. The epigenetic editor of any one of claims 177-183, wherein the Dnmt3A-Dnmt3L fusion protein domain comprises from N terminus to C terminus: Dnmt3L-Dnmt3A.
[0701] 186. The epigenetic editor of any one of claims 167-175, wherein the epigenetic effector protein comprises a histone deacetylase domain and the affinity domain specifically binds to a Dnmt3A domain.
[0702] 187. The epigenetic editor of any one of claims 167-175, wherein the epigenetic effector protein comprises a histone deacetylase domain and the affinity domain specifically binds to a Dnmt3L domain.
[0703] 188. The epigenetic editor of any one of claims 167-175, wherein the epigenetic effector protein comprises a histone deacetylase domain and the affinity domain specifically binds to a Dnmt3B domain.
[0704] 189. The epigenetic editor of any one of claims 167-175, wherein the epigenetic effector protein comprises a histone deacetylase domain and the affinity domain specifically binds to a Dnmt1 domain.
[0705] 190. The epigenetic editor of any one of claims 167-175, wherein the epigenetic effector protein comprises a KAP1 domain and the affinity domain that specifically binds to a Dnmt3A domain, a Dnmt3L domain, a Dnmt3B domain, or a Dnmt1 domain.
[0706] 191. The epigenetic editor of any one of claims 167-175, wherein the epigenetic effector protein comprises a KRAB domain and the affinity domain that specifically binds to a Dnmt3A domain, a Dnmt3L domain, a Dnmt3B domain, or a Dnmt1 domain.
[0707] 192. The epigenetic editor of any one of claims 167-175, wherein the epigenetic effector protein comprises a MECP2 domain and the affinity domain that specifically binds to a Dnmt3A domain, a Dnmt3L domain, a Dnmt3B domain, or a Dnmt1 domain.
[0708] 193. The epigenetic editor of any one of claims 167-175, wherein the epigenetic effector protein comprises a HP1 domain and the affinity domain that specifically binds to a Dnmt3A domain, a Dnmt3L domain, a Dnmt3B domain, or a Dnmt1 domain.
[0709] 194. The epigenetic editor of any one of claims 167-175, wherein the epigenetic effector protein comprises a chromoshadow domain and an affinity domain that specifically binds to a Dnmt3A domain, a Dnmt3L domain, a Dnmt3B domain, or a Dnmt1 domain.
[0710] 195. The epigenetic editor of any one of claims 167-175, wherein the epigenetic editor comprises from N terminus to C terminus: (i) a KAP1 domain, a KRAB domain, a HP1 domain, a MECP2 domain, or a chromoshadow domain, (ii) the DNA binding domain, and (iii) the affinity domain.
[0711] 196. The epigenetic editor of any one of claims 167-175, wherein the epigenetic editor comprises from N terminus to C terminus (i) the affinity domain, (ii) the DNA binding domain, and (iii) (i) a KAP1 domain, a KRAB domain, a HP1 domain, a MECP2 domain, or a chromoshadow domain.
[0712] 197. The epigenetic editor of any one of claim 166 or 168-175, wherein the epigenetic editor further comprises a second affinity domain that specifically binds to a second epigenetic effector protein in the cell, wherein the second epigenetic effector protein results in reduced or silenced expression of the target gene.
[0713] 198. The epigenetic editor of claim 197, wherein the second effector protein comprises a DNA methyltransferase domain.
[0714] 199. The epigenetic editor of claim 197, wherein the second epigenetic effector protein comprises a transcription repressor, a DNA methyltransferase, a histone methyltransferase, a histone demethylase, a histone deacetylase, or any combination thereof.
[0715] 200. The epigenetic editor of claim 197, wherein the second epigenetic effector protein recruits a transcription repressor, a DNA methyltransferase, a histone methyltransferase, a histone demethylase, a histone deacetylase, or any combination thereof to the target gene.
[0716] 201. The epigenetic editor of claim 197, wherein the second epigenetic effector protein comprises a KRAB domain, a KAP1 domain, a HP1 domain, a Dnmt3A domain, a Dnmt3L domain, a chromoshadow domain, or any combination thereof.
[0717] 202. The epigenetic editor of claim 197, wherein the second epigenetic effector domain comprises a protein of Table 2 or Table 3.
[0718] 203. The epigenetic editor of claim 166 or 167, wherein the DNA methylation regulatory protein comprises a DNA demethylase domain.
[0719] 204. The epigenetic editor of claim 203, wherein the DNA demethylase domain comprise a TET family protein.
[0720] 205. The epigenetic editor of claim 204, wherein the DNA demethylase domain comprise TET1.
[0721] 206. The epigenetic editor of any one of claims 203-205, wherein the epigenetic effector protein results in increased expression of the target gene as compared to the target gene not contacted with the epigenetic editor.
[0722] 207. The epigenetic editor of any one of claims 203-206, wherein the epigenetic effector protein comprises a histone acetyltransferase.
[0723] 208. The epigenetic editor of any one of claims 203-206, wherein the epigenetic effector protein recruits a transcription activator, a DNA demethylase, a histone methyltransferase, a histone demethylase, a histone acetylase, or any combination thereof to the target gene.
[0724] 209. The epigenetic editor of any one of claims 203-206, wherein the epigenetic effector protein comprises a VP16 domain, a VP64 domain, a p65 domain, or a RTA domain.
[0725] 210. The epigenetic editor of any one of claims 203-206, wherein the epigenetic effector protein comprises a protein from Table 5 or Table 6.
[0726] 211. The epigenetic editor of any one of claims 203-210, wherein the epigenetic editor further comprises a second affinity domain that specifically binds to a second epigenetic effector protein that increases expression of the target gene.
[0727] 212. The epigenetic editor of claim 211, wherein the second epigenetic effector protein comprises a DNA demethylase domain.
[0728] 213. The epigenetic editor of claim 211, wherein the second epigenetic effector protein comprises a histone acetyltransferase domain.
[0729] 214. The epigenetic editor of claim 211, wherein the second epigenetic effector protein recruits a transcription activator, a DNA demethylase, a histone methyltransferase, a histone demethylase, a histone acetylase, or any combination thereof.
[0730] 215. The epigenetic editor of claim 211, wherein the second epigenetic effector protein comprises a TET1 domain, a VP16 domain, a VP64 domain, a p65 domain, a RTA domain, or any combination thereof.
[0731] 216. The epigenetic editor of claim 211, wherein the second epigenetic effector protein comprises a protein form Table 5 or Table 6.
[0732] 217. The epigenetic editor of any one of claims 166-216, wherein the affinity domain comprises a single chain antibody, a nanobody, an antigen binding sequence, an antibody, a nanobody, a functional antibody fragment, a single chain variable fragment (scFv), an Fab, a single-domain antibody (sdAb), a VH domain, a VL domain, a VNAR domain, a VHH domain, a bispecific antibody, a diabody, or a functional fragment or a combination thereof.
[0733] 218. An epigenetic editor that comprises a DNA binding domain, a DNA methyltransferase domain, and an epigenetic effector domain, wherein the epigenetic effector domain is a KAP1 domain, a HP1 domain, a chromoshadow domain, or a MECP2 domain.
[0734] 219. An epigenetic editor that comprises a DNA binding domain, a DNA methyltransferase domain selected from Table 1, and an epigenetic effector domain selected from Table 2 or Table 3.
[0735] 220. An epigenetic editor that comprises a DNA binding domain, a DNA demethylase domain selected from Table 4, and an epigenetic effector domain selected from Table 5 or Table 6.
[0736] 221. The epigenetic editor of any one of claim 218 or 220, wherein the DNA methyltransferase domain comprises a Dnmt1 domain, a Dnmt3A domain, a Dnmt3L domain, or a Dnmt3B domain.
[0737] 222. The epigenetic editor of any one of claim 218 or 220, wherein the DNA methyltransferase domain comprises a Dnmt3A-Dnmt3L fusion.
[0738] 223. The epigenetic editor of claim 222, wherein the Dnmt3A-Dnmt3L fusion protein domain comprises from N terminus to C terminus: Dnmt3A-Dnmt3L.
[0739] 224. The epigenetic editor of claim 222, wherein the Dnmt3A-Dnmt3L fusion protein domain comprises from N terminus to C terminus: Dnmt3L-Dnmt3A.
[0740] 225. The epigenetic editor of any one of claims 222-224, comprising from N terminus to C terminus (i) the Dnmt3A-Dnmt3L fusion protein domain, (ii) the DNA binding domain, and (iii) epigenetic effector domain.
[0741] 226. The epigenetic editor of any one of claims 222-225, comprising from N terminus to C terminus (i) the epigenetic effector domain, (ii) the DNA binding domain, and (iii) Dnmt3A-Dnmt3L fusion protein domain.
[0742] 227. The epigenetic editor of any one of claims 218-226, wherein the DNA binding domain binds to a target sequence in a target gene and directs the epigenetic effector domain to the target gene to effect an epigenetic modification in a nucleotide in the target gene or a histone bound to the target gene when contacted with the target gene.
[0743] 228. The method of any one of claim 227, wherein the epigenetic effector domain results in reduced or silenced expression of the target gene as compared to the target gene not contacted with the epigenetic editor.
[0744] 229. The method of any one of claim 227, wherein the epigenetic effector domain results in increased expression of the target gene as compared to the target gene not contacted with the epigenetic editor.
[0745] 230. The epigenetic editor of any one of claims 166-229, wherein the epigenetic modification is within a coding region of the target gene.
[0746] 231. The epigenetic editor of any one of claims 166-229, wherein the epigenetic modification is in an expression regulatory sequence of the target gene.
[0747] 232. The epigenetic editor of any one of claim 166-229, wherein the epigenetic modification is within 3000 base pairs upstream or downstream of an expression regulatory sequence of the target gene.
[0748] 233. The epigenetic editor of claim 231 or 232, wherein the expression regulatory sequence comprises a promoter.
[0749] 234. The epigenetic editor of claim 231 or 232, wherein the expression regulatory sequence comprises a transcription initiation start site.
[0750] 235. The epigenetic editor of claim 231 or 232, wherein the expression regulatory sequence comprises an enhancer.
[0751] 236. The method of any one of claim 219 or 221-235, wherein the epigenetic editor further comprises a second epigenetic effector domain that results in reduced or silenced expression of the target gene.
[0752] 237. The method of claim 236, wherein the second epigenetic effector domain comprises or recruits a transcription repressor, a DNA methyltransferase, a histone methyltransferase, a histone demethylase, a histone deacetylase, or any combination thereof.
[0753] 238. The method of claim 236, wherein the second epigenetic effector domain comprises a protein of Table 2 or Table 3.
[0754] 239. The method of any one of claims 232-238, wherein the epigenetic effector domain and the second epigenetic effector domain synergistically reduces or silences expression of the target gene.
[0755] 240. The method of any one of claim 218 or 220-234, wherein the epigenetic editor further comprises a second epigenetic effector domain that results in increased expression of the target gene.
[0756] 241. The method of claim 240, wherein the second epigenetic effector domain comprises a transcription activator, a DNA demethylase, a histone methyltransferase, a histone demethylase, a histone acetyltransferase, or any combination thereof.
[0757] 242. The method of claim 240, wherein the second epigenetic effector domain recruits a transcription activator, a DNA demethylase, a histone methyltransferase, a histone demethylase, a histone acetyltransferase, or any combination thereof to the target gene.
[0758] 243. The method of claim 240, wherein the second epigenetic effector domain comprises a protein of table 5 or Table 6.
[0759] 244. The method of any one of claims 241-243, wherein the epigenetic effector domain and the second epigenetic effector domain synergistically reduces or silences expression of the target gene.
[0760] 245. The epigenetic editor of any one of claims 166-244, wherein the target gene comprises an allele associated with a disease.
[0761] 246. The epigenetic editor of any one of claims 166-244, wherein the target gene comprises two heterozygotic copies and wherein the DNA binding domain binds to one of the two heterozygotic copies and not the other.
[0762] 247. The epigenetic editor of any one of claims 166-244, wherein the target gene is heterozygous at an allele.
[0763] 248. The epigenetic editor of any one of claims 166-247, wherein the DNA binding domain comprises a zinc finger motif.
[0764] 249. The epigenetic editor of any one of claims 166-248, wherein the DNA binding domain comprises a zinc finger array.
[0765] 250. The epigenetic editor of claim 249, wherein the zinc finger array comprises at least six zinc fingers.
[0766] 251. The epigenetic editor of claim 249, wherein the zinc finger array comprises at least three subsets of zinc fingers each comprising at least two zinc fingers.
[0767] 252. The epigenetic editor of any one of claims 166-247, wherein the DNA binding domain comprises a nucleic acid guided DNA binding domain bound to a guide polynucleotide.
[0768] 253. The epigenetic editor of claim 252, wherein the DNA binding domain comprises CRISPR-Cas protein bound to the guide polynucleotide.
[0769] 254. The epigenetic editor of claim 252, wherein the guide polynucleotide hybridizes with the target sequence.
[0770] 255. The epigenetic editor of claim 253 or 254, wherein the CRISPR-Cas protein comprises a nuclease inactive Cas9 (dCas9).
[0771] 256. The epigenetic editor of claim 253 or 254, wherein the CRISRP-Cas protein comprises a nuclease inactive Cas12a (dCas12a).
[0772] 257. The epigenetic editor of claim 237 or 238, wherein the CRISRP-Cas protein comprises a nuclease inactive CasX (dCasX).
[0773] 258. The epigenetic editor of any one of claims 248-257, wherein the epigenetic editor further comprises a second DNA binding domain that binds to a second target sequence in a second target gene, and wherein the second DNA binding domain directs the epigenetic effector domain to effect an epigenetic modification in the second target gene or a histone bound to the second target gene.
[0774] 259. The epigenetic editor of claim 258, wherein the second DNA binding domain comprises a zinc finger array.
[0775] 260. The epigenetic editor of claim 259, wherein the zinc finger array comprises at least six zinc fingers.
[0776] 261. The epigenetic editor of claim 259, wherein the zinc finger array comprises at least three subsets of zinc fingers each comprising at least two zinc fingers.
[0777] 262. The epigenetic editor of claim 258, wherein the second DNA binding domain comprises a second nucleic acid guided DNA binding domain bound to a second guide polynucleotide.
[0778] 263. The epigenetic editor of claim 262, wherein the second guide polynucleotide hybridizes with the second target sequence in the second target gene.
[0779] 264. The method of any one of claims 258-263, wherein the second target gene is the same as the target gene.
[0780] 265. The method of claim 264, wherein the second target sequence overlaps with the target sequence.
[0781] 266. The method of claim 264 or 265, wherein the second target sequence is within 1000 base pairs flanking the target sequence.
[0782] 267. The method of claim 264 or 265, wherein the second target sequence is within 500 base pairs flanking the target sequence.
[0783] 268. The method of any one of claims 258-263, wherein the second target gene is different from the target gene.
[0784] 269. The method of claim 268, wherein the target gene and the second target gene are associated with in a same metabolic pathway or function.
[0785] 270. The method of claim 268, wherein the target gene and the second target gene are associated with a same disease or condition.
[0786] 271. The epigenetic editor of any one of claims 166-270, wherein the epigenetic editor further comprises a linker.
[0787] 272. The epigenetic editor of claim 271, wherein the linker is a peptide linker, thereby forming a fusion protein.
[0788] 273. A nucleic acid encoding the fusion protein of claim 272.
[0789] 274. A set of nucleic acids comprising a first nucleic acid encoding a first part and a second nucleic acid encoding a second part of the fusion protein of claim 272, wherein the first part and the second part comprise the fusion protein of claim 272 when combined.
[0790] 275. The set of nucleic acids of claim 274, wherein the first nucleic acid further encodes a N terminal part of an intein and wherein the second nucleic acid further comprises a C terminal part of the intein.
[0791] 276. A vector comprising the nucleic acid of claim 273.
[0792] 277. A set of vectors comprising a first vector comprising the first nucleic acid of claim 274 and a second vector comprising the second nucleic acid of claim 274.
[0793] 278. The vector of claim 276, wherein the vector is a virus vector.
[0794] 279. The vector of claim 278, wherein the vector is a lentivirus vector, an adenovirus vector, a herpes virus vector, or an adeno-associated virus (AAV) vector.
[0795] 280. The vector of claim 279, wherein the vector is an AAV1, AAV2, AAV3, AAV4, AAV5, AAV6, AAV7, AAV8, AAV9, or AAV10 vector.
[0796] 281. The set of vectors of claim 277, wherein the first vector and the second vector are virus vectors.
[0797] 282. The set of vectors of claim 277, wherein the first vector and the second vector are lentivirus vectors, adenovirus vectors, herpes virus vectors, or adeno-associated virus (AAV) vectors.
[0798] 283. The vector of claim 279, wherein the first vector or the second vector is an AAV1, AAV2, AAV3, AAV4, AAV5, AAV6, AAV7, AAV8, AAV9, or AAV10 vector.
[0799] 284. A cell comprising the epigenetic editor of any one of claims 161-272, the nucleic acid of claim 273, the set of nucleic acids of claim 274 or 275, the vector of any one of claim 276 or 278-280, or the set of vectors of any one of claim 277 or 281-283.
[0800] 285. The cell of any one of claims 159-163 or 284, wherein the cell is a primary cell.
[0801] 286. The cell of any one of claims 159-163 or 284, wherein the cell is a non-dividing cell.
[0802] 287. The cell of any one of claims 159-163 or 284, wherein the cell is a stem cell.
[0803] 288. The cell of any one of claims 159-163 or 284-287, wherein the cell is a mammalian cell.
[0804] 289. The cell of claim 288, wherein the cell is a human cell.
[0805] 290. The cell of any one of claims 285-289, wherein the cell is ex vivo or in vivo.
[0806] 291. A composition comprising the epigenetic editor of any one of claims 161-272, the nucleic acid of claim 273, the set of nucleic acids of claim 274 or 275, the vector of any one of claim 276 or 278-280, the set of vectors of any one of claim 277 or 281-283, or the cell of any one of claims 284-290.
[0807] 292. The composition of claim 291, further comprising a pharmaceutically acceptable carrier.
[0808] 293. An Epigenetic Editor comprising:
   [0809] a DNA binding domain capable of binding to a target sequence in a target chromosome and directing the Epigenetic Editor to repress or silence expression of a target gene;
   [0810] one or more effector domains selected from the group consisting of a DNA methyltransferase domain and an effector domain that recruits a DNA methyltransferase; and
   [0811] one or more effector domains selected from the group consisting of a histone methyltransferase domain that reduces transcription at the target gene, a histone demethylase domain that reduces transcription at the target gene, a histone deacetylase domain, an effector domain that recruits a histone methyltransferase that reduces transcription at the target gene, an effector domain that recruits a histone demethylase that reduces transcription at the target gene and an effector domain that recruits a histone deacetylase.
[0812] 294. The Epigenetic Editor of claim 293, wherein the Epigenetic Editor further comprises one or more effector domains selected from the group consisting of a transcription repressor domain and an effector domain that recruits a transcriptional repressor.
[0813] 295. The Epigenetic Editor of claim 294, wherein the transcriptional repressor domain or the effector domain that recruits a transcriptional repressor is not an effector domain from claims 293 (c).
[0814] 296. The Epigenetic Editor of claims 293-295, wherein the effector domain from (c) is a KRAB repression domain.
[0815] 297. The Epigenetic Editor of claim 296, wherein the KRAB repression domain is a KOX1/ZNF10 domain or a ZIM3 domain.
[0816] 298. An Epigenetic Editor comprising:
   [0817] a DNA binding domain capable of binding to a target sequence in a target chromosome and directing the Epigenetic Editor to increase expression of a target gene;
   [0818] one or more effector domains selected from the group consisting of a DNA demethylase domain and an effector domain that recruits a DNA demethylase; and
   [0819] one or more effector domains selected from the group consisting of a histone methyltransferase domain that increases transcription at the target gene, a histone demethylase domain that increases transcription at the target gene, a histone acetylase domain, an effector domain that recruits a histone methyltransferase that increases transcription at the target gene, an effector domain that recruits a histone demethylase that increases transcription at the target gene and an effector domain that recruits a histone acetylase.
[0820] 299. The Epigenetic Editor of claim 298, wherein the Epigenetic Editor further comprises one or more effector domains selected from the group consisting of a transcription activation domain and an effector domain that recruits a transcription activator.
[0821] 300. The Epigenic Editor of claim 299, wherein the selected effector domain is not an effector domain from claim 298 (c).
[0822] 301. The Epigenetic Editor of claim 300, wherein the selected effector domain is a VP16 domain, a VP64 domain, a p65 domain, or ab RTA domain.
[0823] 302. The Epigenetic Editor of claims 293-301, wherein the Epigenetic Editor is a polypeptide.

Sequence Tables

| SEQ | | |
|---|---|---|
| ID | | |
| NO | Description | Sequence |
| 1 | S. | ATGGATAAGAAATACTCAATAGGCTTAGATATCGGCACAAATAGCGTCG |
| | pyogenes | GATGGGCGGTGATCACTGATGAATATAAGGTTCCGTCTAAAAAGTTCAA |
| | WT Cas9 | GGTTCTGGGAAATACAGACCGCCACAGTATCAAAAAAAATCTTATAGGG |
| | NT | GCTCTTTTATTTGACAGTGGAGAGACAGCGGAAGCGACTCGTCTCAAAC |
| | Sequence | GGACAGCTCGTAGAAGGTATACACGTCGGAAGAATCGTATTTGTTATCT |
| | | ACAGGAGATTTTTTCAAATGAGATGGCGAAAGTAGATGATAGTTTCTTT |
| | | CATCGACTTGAAGAGTCTTTTTTGGTGGAAGAAGACAAGAAGCATGAAC |
| | | GTCATCCTATTTTTGGAAATATAGTAGATGAAGTTGCTTATCATGAGAA |
| | | ATATCCAACTATCTATCATCTGCGAAAAAAATTGGTAGATTCTACTGAT |
| | | AAAGCGGATTTGCGCTTAATCTATTTGGCCTTAGCGCATATGATTAAGTT |
| | | TCGTGGTCATTTTTTGATTGAGGGAGATTTAAATCCTGATAATAGTGATG |
| | | TGGACAAACTATTTATCCAGTTGGTACAAACCTACAATCAATTATTTGA |
| | | AGAAAACCCTATTAACGCAAGTGGAGTAGATGCTAAAGCGATTCTTTCT |
| | | GCACGATTGAGTAAATCAAGACGATTAGAAAATCTCATTGCTCAGCTCC |
| | | CCGGTGAGAAGAAAAATGGCTTATTTGGGAATCTCATTGCTTTGTCATT |
| | | GGGTTTGACCCCTAATTTTAAATCAAATTTTGATTTGGCAGAAGATGCTA |
| | | AATTACAGCTTTCAAAAGATACTTACGATGATGATTTAGATAATTTATTG |
| | | GCGCAAATTGGAGATCAATATGCTGATTTGTTTTTGGCAGCTAAGAATTT |
| | | ATCAGATGCTATTTTACTTTCAGATATCCTAAGAGTAAATACTGAAATA |
| | | ACTAAGGCTCCCCTATCAGCTTCAATGATTAAACGCTACGATGAACATC |
| | | ATCAAGACTTGACTCTTTTAAAAGCTTTAGTTCGACAACAACTTCCAGA |
| | | AAAGTATAAAGAAATCTTTTTTGATCAATCAAAAAACGGATATGCAGGT |
| | | TATATTGATGGGGGAGCTAGCCAAGAAGAATTTTATAAATTTATCAAAC |
| | | CAATTTTAGAAAAAATGGATGGTACTGAGGAATTATTGGTGAAACTAAA |
| | | TCGTGAAGATTTGCTGCGCAAGCAACGGACCTTTGACAACGGCTCTATT |
| | | CCCCATCAAATTCACTTGGGTGAGCTGCATGCTATTTTGAGAAGACAAG |
| | | AAGACTTTTATCCATTTTTAAAAGACAATCGTGAGAAGATTGAAAAAAT |
| | | CTTGACTTTTCGAATTCCTTATTATGTTGGTCCATTGGCGCGTGGCAATA |
| | | GTCGTTTTGCATGGATGACTCGGAAGTCTGAAGAAACAATTACCCCATG |
| | | GAATTTTGAAGAAGTTGTCGATAAAGGTGCTTCAGCTCAATCATTTATTG |
| | | AACGCATGACAAACTTTGATAAAAATCTTCCAAATGAAAAAGTACTACC |
| | | AAAACATAGTTTGCTTTATGAGTATTTTACGGTTTATAACGAATTGACAA |
| | | AGGTCAAATATGTTACTGAAGGAATGCGAAAACCAGCATTTCTTTCAGG |
| | | TGAACAGAAGAAAGCCATTGTTGATTTACTCTTCAAAACAAATCGAAAA |
| | | GTAACCGTTAAGCAATTAAAAGAAGATTATTTCAAAAAAATAGAATGTT |
| | | TTGATAGTGTTGAAATTTCAGGAGTTGAAGATAGATTTAATGCTTCATTA |
| | | GGTACCTACCATGATTTGCTAAAAATTATTAAAGATAAAGATTTTTTGG |
| | | ATAATGAAGAAAATGAAGATATCTTAGAGGATATTGTTTTAACATTGAC |
| | | CTTATTTGAAGATAGGGAGATGATTGAGGAAAGACTTAAAACATATGCT |
| | | CACCTCTTTGATGATAAGGTGATGAAACAGCTTAAACGTCGCCGTTATA |
| | | CTGGTTGGGGACGTTTGTCTCGAAAATTGATTAATGGTATTAGGGATAA |
| | | GCAATCTGGCAAAACAATATTAGATTTTTTGAAATCAGATGGTTTTGCC |
| | | AATCGCAATTTTATGCAGCTGATCCATGATGATAGTTTGACATTTAAAG |
| | | AAGACATTCAAAAAGCACAAGTGTCTGGACAAGGCGATAGTTTACATG |
| | | AACATATTGCAAATTTAGCTGGTAGCCCTGCTATTAAAAAAGGTATTTT |
| | | ACAGACTGTAAAAGTTGTTGATGAATTGGTCAAAGTAATGGGGGGCAT |
| | | AAGCCAGAAAATATCGTTATTGAAATGGCACGTGAAAATCAGACAACTC |
| | | AAAAGGGCCAGAAAAATTCGCGAGAGCGTATGAAACGAATCGAAGAAG |
| | | GTATCAAAGAATTAGGAAGTCAGATTCTTAAAGAGCATCCTGTTGAAAA |
| | | TACTCAATTGCAAAATGAAAAGCTCTATCTCTATTATCTCCAAAATGGA |
| | | AGAGACATGTATGTGGACCAAGAATTAGATATTAATCGTTTAAGTGATT |
| | | ATGATGTCGATCACATTGTTCCACAAAGTTTCCTTAAAGACGATTCAATA |
| | | GACAATAAGGTCTTAACGCGTTCTGATAAAAATCGTGGTAAATCGGATA |
| | | ACGTTCCAAGTGAAGAAGTAGTCAAAAAGATGAAAAACTATTGGAGAC |
| | | AACTTCTAAACGCCAAGTTAATCACTCAACGTAAGTTTGATAATTTAAC |
| | | GAAAGCTGAACGTGGAGGTTTGAGTGAACTTGATAAAGCTGGTTTTATC |
| | | AAACGCCAATTGGTTGAAACTCGCCAAATCACTAAGCATGTGGCACAAA |
| | | TTTTGGATAGTCGCATGAATACTAAATACGATGAAAATGATAAACTTAT |
| | | TCGAGAGGTTAAAGTGATTACCTTAAAATCTAAATTAGTTTCTGACTTCC |
| | | GAAAAGATTTCCAATTCTATAAAGTACGTGAGATTAACAATTACCATCA |
| | | TGCCCATGATGCGTATCTAAATGCCGTCGTTGGAACTGCTTTGATTAAGA |
| | | AATATCCAAAACTTGAATCGGAGTTTGTCTATGGTGATTATAAAGTTTAT |
| | | GATGTTCGTAAAATGATTGCTAAGTCTGAGCAAGAAATAGGCAAAGCA |
| | | ACCGCAAAATATTTCTTTTACTCTAATATCATGAACTTCTTCAAAACAGA |
| | | AATTACACTTGCAAATGGAGAGATTCGCAAACGCCCTCTAATCGAAACT |
| | | AATGGGGAAACTGGAGAAATTGTCTGGGATAAAGGGCGAGATTTTGCC |
| | | ACAGTGCGCAAAGTATTGTCCATGCCCCAAGTCAATATTGTCAAGAAAA |
| | | CAGAAGTACAGACAGGCGGATTCTCCAAGGAGTCAATTTTACCAAAAA |
| | | GAAATTCGGACAAGCTTATTGCTCGTAAAAAAGACTGGGATCCAAAAA |
| | | AATATGGTGGTTTTGATAGTCCAACGGTAGCTTATTCAGTCCTAGTGGTT |
| | | GCTAAGGTGGAAAAAGGGAAATCGAAGAAGTTAAAATCCGTTAAAGAG |
| | | TTACTAGGGATCACAATTATGGAAAGAAGTTCCTTTGAAAAAAATCCGA |
| | | TTGACTTTTTAGAAGCTAAAGGATATAAGGAAGTTAAAAAAGACTTAAT |
| | | CATTAAACTACCTAAATATAGTCTTTTTGAGTTAGAAAACGGTCGTAAA |
| | | CGGATGCTGGCTAGTGCCGGAGAATTACAAAAAGGAAATGAGCTGGCT |
| | | CTGCCAAGCAAATATGTGAATTTTTTATATTTAGCTAGTCATTATGAAAA |
| | | GTTGAAGGGTAGTCCAGAAGATAACGAACAAAAACAATTGTTTGTGGA |
| | | GCAGCATAAGCATTATTTAGATGAGATTATTGAGCAAATCAGTGAATTT |
| | | TCTAAGCGTGTTATTTTAGCAGATGCCAATTTAGATAAAGTTCTTAGTGC |
| | | ATATAACAAACATAGAGACAAACCAATACGTGAACAAGCAGAAAATAT |
| | | TATTCATTTATTTACGTTGACGAATCTTGGAGCTCCCGCTGCTTTTAAAT |
| | | ATTTTGATACAACAATTGATCGTAAACGATATACGTCTACAAAAGAAGT |
| | | TTTAGATGCCACTCTTATCCATCAATCCATCACTGGTCTTTATGAAACAC |
| | | GCATTGATTTGAGTCAGCTAGGAGGTGACTGA |
| 2 | S. | MDKKYSIGLDIGTNSVGWAVITDEYKVPSKKFKVLGNTDRHSIKKNLIGAL |
| | pyogenes | LFDSGETAEATRLKRTARRRYTRRKNRICYLQEIFSNEMAKVDDSFFHRLEE |
| | WT Cas9 | SFLVEEDKKHERHPIFGNIVDEVAYHEKYPTIYHLRKKLVDSTDKADLRLIY |
| | AA | LALAHMIKFRGHFLIEGDLNPDNSDVDKLFIQLVQTYNQLFEENPINASGVD |
| | Sequence | AKAILSARLSKSRRLENLIAQLPGEKKNGLFGNLIALSLGLTPNFKSNFDLAE |
| | | DAKLQLSKDTYDDDLDNLLAQIGDQYADLFLAAKNLSDAILLSDILRVNTEI |
| | | TKAPLSASMIKRYDEHHQDLTLLKALVRQQLPEKYKEIFFDQSKNGYAGYI |
| | | DGGASQEEFYKFIKPILEKMDGTEELLVKLNREDLLRKQRTFDNGSIPHQIH |
| | | LGELHAILRRQEDFYPFLKDNREKIEKILTFRIPYYVGPLARGNSRFAWMTR |
| | | KSEETITPWNFEEVVDKGASAQSFIERMTNFDKNLPNEKVLPKHSLLYEYFT |
| | | VYNELTKVKYVTEGMRKPAFLSGEQKKAIVDLLFKTNRKVTVKQLKEDYF |
| | | KKIECFDSVEISGVEDRFNASLGTYHDLLKIIKDKDFLDNEENEDILEDIVLTL |
| | | TLFEDREMIEERLKTYAHLFDDKVMKQLKRRRYTGWGRLSRKLINGIRDK |
| | | QSGKTILDFLKSDGFANRNFMQLIHDDSLTFKEDIQKAQVSGQGDSLHEHIA |
| | | NLAGSPAIKKGILQTVKVVDELVKVMGRHKPENIVIEMARENQTTQKGQK |
| | | NSRERMKRIEEGIKELGSQILKEHPVENTQLQNEKLYLYYLQNGRDMYVDQ |
| | | ELDINRLSDYDVDHIVPQSFLKDDSIDNKVLTRSDKNRGKSDNVPSEEVVK |
| | | KMKNYWRQLLNAKLITQRKFDNLTKAERGGLSELDKAGFIKRQLVETRQIT |
| | | KHVAQILDSRMNTKYDENDKLIREVKVITLKSKLVSDFRKDFQFYKVREIN |
| | | NYHHAHDAYLNAVVGTALIKKYPKLESEFVYGDYKVYDVRKMIAKSEQEI |
| | | GKATAKYFFYSNIMNFFKTEITLANGEIRKRPLIETNGETGEIVWDKGRDFA |
| | | TVRKVLSMPQVNIVKKTEVQTGGFSKESILPKRNSDKLIARKKDWDPKKYG |
| | | GFDSPTVAYSVLVVAKVEKGKSKKLKSVKELLGITIMERSSFEKNPIDFLEA |
| | | KGYKEVKKDLIIKLPKYSLFELENGRKRMLASAGELQKGNELALPSKYVNF |
| | | LYLASHYEKLKGSPEDNEQKQLFVEQHKHYLDEIIEQISEFSKRVILADANL |
| | | DKVLSAYNKHRDKPIREQAENIIHLFTLTNLGAPAAFKYFDTTIDRKRYTST |
| | | KEVLDATLIHQSITGLYETRIDLSQLGGD |
| 3 | dCas9 | MDKKYSIGLAIGTNSVGWAVITDEYKVPSKKFKVLGNTDRHSIKKNLIGAL |
| | | LFDSGETAEATRLKRTARRRYTRRKNRICYLQEIFSNEMAKVDDSFFHRLEE |
| | | SFLVEEDKKHERHPIFGNIVDEVAYHEKYPTIYHLRKKLVDSTDKADLRLIY |
| | | LALAHMIKFRGHFLIEGDLNPDNSDVDKLFIQLVQTYNQLFEENPINASGVD |
| | | AKAILSARLSKSRRLENLIAQLPGEKKNGLFGNLIALSLGLTPNFKSNFDLAE |
| | | DAKLQLSKDTYDDDLDNLLAQIGDQYADLFLAAKNLSDAILLSDILRVNTEI |
| | | TKAPLSASMIKRYDEHHQDLTLLKALVRQQLPEKYKEIFFDQSKNGYAGYI |
| | | DGGASQEEFYKFIKPILEKMDGTEELLVKLNREDLLRKQRTFDNGSIPHQIH |
| | | LGELHAILRRQEDFYPFLKDNREKIEKILTFRIPYYVGPLARGNSRFAWMTR |
| | | KSEETITPWNFEEVVDKGASAQSFIERMTNFDKNLPNEKVLPKHSLLYEYFT |
| | | VYNELTKVKYVTEGMRKPAFLSGEQKKAIVDLLFKTNRKVTVKQLKEDYF |
| | | KKIECFDSVEISGVEDRFNASLGTYHDLLKIIKDKDFLDNEENEDILEDIVLTL |
| | | TLFEDREMIEERLKTYAHLFDDKVMKQLKRRRYTGWGRLSRKLINGIRDK |
| | | QSGKTILDFLKSDGFANRNFMQLIHDDSLTFKEDIQKAQVSGQGDSLHEHIA |
| | | NLAGSPAIKKGILQTVKVVDELVKVMGRHKPENIVIEMARENQTTQKGQK |
| | | NSRERMKRIEEGIKELGSQILKEHPVENTQLQNEKLYLYYLQNGRDMYVDQ |
| | | ELDINRLSDYDVDAIVPQSFLKDDSIDNKVLTRSDKNRGKSDNVPSEEVVK |
| | | KMKNYWRQLLNAKLITQRKFDNLTKAERGGLSELDKAGFIKRQLVETRQIT |
| | | KHVAQILDSRMNTKYDENDKLIREVKVITLKSKLVSDFRKDFQFYKVREIN |
| | | NYHHAHDAYLNAVVGTALIKKYPKLESEFVYGDYKVYDVRKMIAKSEQEI |
| | | GKATAKYFFYSNIMNFFKTEITLANGEIRKRPLIETNGETGEIVWDKGRDFA |
| | | TVRKVLSMPQVNIVKKTEVQTGGFSKESILPKRNSDKLIARKKDWDPKKYG |
| | | GFDSPTVAYSVLVVAKVEKGKSKKLKSVKELLGITIMERSSFEKNPIDFLEA |
| | | KGYKEVKKDLIIKLPKYSLFELENGRKRMLASAGELQKGNELALPSKYVNF |
| | | LYLASHYEKLKGSPEDNEQKQLFVEQHKHYLDEIIEQISEFSKRVILADANL |
| | | DKVLSAYNKHRDKPIREQAENIIHLFTLTNLGAPAAFKYFDTTIDRKRYTST |
| | | KEVLDATLIHQSITGLYETRIDLSQLGGD |
| 4 | inactive | MDKKYSIGLAIGTNSVGWAVITDEYKVPSKKFKVLGNTDRHSIKKNLIGAL |
| | VRER | LFDSGETAEATRLKRTARRRYTRRKNRICYLQEIFSNEMAKVDDSFFHRLEE |
| | SpCas9 | SFLVEEDKKHERHPIFGNIVDEVAYHEKYPTIYHLRKKLVDSTDKADLRLIY |
| | | LALAHMIKFRGHFLIEGDLNPDNSDVDKLFIQLVQTYNQLFEENPINASGVD |
| | | AKAILSARLSKSRRLENLIAQLPGEKKNGLFGNLIALSLGLTPNFKSNFDLAE |
| | | DAKLQLSKDTYDDDLDNLLAQIGDQYADLFLAAKNLSDAILLSDILRVNTEI |
| | | TKAPLSASMIKRYDEHHQDLTLLKALVRQQLPEKYKEIFFDQSKNGYAGYI |
| | | DGGASQEEFYKFIKPILEKMDGTEELLVKLNREDLLRKQRTFDNGSIPHQIH |
| | | LGELHAILRRQEDFYPFLKDNREKIEKILTFRIPYYVGPLARGNSRFAWMTR |
| | | KSEETITPWNFEEVVDKGASAQSFIERMTNFDKNLPNEKVLPKHSLLYEYFT |
| | | VYNELTKVKYVTEGMRKPAFLSGEQKKAIVDLLFKTNRKVTVKQLKEDYF |
| | | KKIECFDSVEISGVEDRFNASLGTYHDLLKIIKDKDFLDNEENEDILEDIVLTL |
| | | TLFEDREMIEERLKTYAHLFDDKVMKQLKRRRYTGWGRLSRKLINGIRDK |
| | | QSGKTILDFLKSDGFANRNFMQLIHDDSLTFKEDIQKAQVSGQGDSLHEHIA |
| | | NLAGSPAIKKGILQTVKVVDELVKVMGRHKPENIVIEMARENQTTQKGQK |
| | | NSRERMKRIEEGIKELGSQILKEHPVENTQLQNEKLYLYYLQNGRDMYVDQ |
| | | ELDINRLSDYDVDAIVPQSFLKDDSIDNKVLTRSDKNRGKSDNVPSEEVVK |
| | | KMKNYWRQLLNAKLITQRKFDNLTKAERGGLSELDKAGFIKRQLVETRQIT |
| | | KHVAQILDSRMNTKYDENDKLIREVKVITLKSKLVSDFRKDFQFYKVREIN |
| | | NYHHAHDAYLNAVVGTALIKKYPKLESEFVYGDYKVYDVRKMIAKSEQEI |
| | | GKATAKYFFYSNIMNFFKTEITLANGEIRKRPLIETNGETGEIVWDKGRDFA |
| | | TVRKVLSMPQVNIVKKTEVQTGGFSKESILPKRNSDKLIARKKDWDPKKYG |
| | | GFVSPTVAYSVLVVAKVEKGKSKKLKSVKELLGITIMERSSFEKNPIDFLEA |
| | | KGYKEVKKDLIIKLPKYSLFELENGRKRMLASARELQKGNELALPSKYVNF |
| | | LYLASHYEKLKGSPEDNEQKQLFVEQHKHYLDEIIEQISEFSKRVILADANL |
| | | DKVLSAYNKHRDKPIREQAENIIHLFTLTNLGAPAAFKYFDTTIDRKEYRST |
| | | KEVLDATLIHQSITGLYETRIDLSQLGGD |
| 5 | inactive | MDKKYSIGLAIGTNSVGWAVITDEYKVPSKKFKVLGNTDRHSIKKNLIGAL |
| | EQR | LFDSGETAEATRLKRTARRRYTRRKNRICYLQEIFSNEMAKVDDSFFHRLEE |
| | SpCas9 | SFLVEEDKKHERHPIFGNIVDEVAYHEKYPTIYHLRKKLVDSTDKADLRLIY |
| | | LALAHMIKFRGHFLIEGDLNPDNSDVDKLFIQLVQTYNQLFEENPINASGVD |
| | | AKAILSARLSKSRRLENLIAQLPGEKKNGLFGNLIALSLGLTPNFKSNFDLAE |
| | | DAKLQLSKDTYDDDLDNLLAQIGDQYADLFLAAKNLSDAILLSDILRVNTEI |
| | | TKAPLSASMIKRYDEHHQDLTLLKALVRQQLPEKYKEIFFDQSKNGYAGYI |
| | | DGGASQEEFYKFIKPILEKMDGTEELLVKLNREDLLRKQRTFDNGSIPHQIH |
| | | LGELHAILRRQEDFYPFLKDNREKIEKILTFRIPYYVGPLARGNSRFAWMTR |
| | | KSEETITPWNFEEVVDKGASAQSFIERMTNFDKNLPNEKVLPKHSLLYEYFT |
| | | VYNELTKVKYVTEGMRKPAFLSGEQKKAIVDLLFKTNRKVTVKQLKEDYF |
| | | KKIECFDSVEISGVEDRFNASLGTYHDLLKIIKDKDFLDNEENEDILEDIVLTL |
| | | TLFEDREMIEERLKTYAHLFDDKVMKQLKRRRYTGWGRLSRKLINGIRDK |
| | | QSGKTILDFLKSDGFANRNFMQLIHDDSLTFKEDIQKAQVSGQGDSLHEHIA |
| | | NLAGSPAIKKGILQTVKVVDELVKVMGRHKPENIVIEMARENQTTQKGQK |
| | | NSRERMKRIEEGIKELGSQILKEHPVENTQLQNEKLYLYYLQNGRDMYVDQ |
| | | ELDINRLSDYDVDAIVPQSFLKDDSIDNKVLTRSDKNRGKSDNVPSEEVVK |
| | | KMKNYWRQLLNAKLITQRKFDNLTKAERGGLSELDKAGFIKRQLVETRQIT |
| | | KHVAQILDSRMNTKYDENDKLIREVKVITLKSKLVSDFRKDFQFYKVREIN |
| | | NYHHAHDAYLNAVVGTALIKKYPKLESEFVYGDYKVYDVRKMIAKSEQEI |
| | | GKATAKYFFYSNIMNFFKTEITLANGEIRKRPLIETNGETGEIVWDKGRDFA |
| | | TVRKVLSMPQVNIVKKTEVQTGGFSKESILPKRNSDKLIARKKDWDPKKYG |
| | | GFESPTVAYSVLVVAKVEKGKSKKLKSVKELLGITIMERSSFEKNPIDFLEA |
| | | KGYKEVKKDLIIKLPKYSLFELENGRKRMLASAGELQKGNELALPSKYVNF |
| | | LYLASHYEKLKGSPEDNEQKQLFVEQHKHYLDEIIEQISEFSKRVILADANL |
| | | DKVLSAYNKHRDKPIREQAENIIHLFTLTNLGAPAAFKYFDTTIDRKQYRST |
| | | KEVLDATLIHQSITGLYETRIDLSQLGGD |
| 6 | inactive | MDKKYSIGLAIGTNSVGWAVITDEYKVPSKKFKVLGNTDRHSIKKNLIGAL |
| | VQR | LFDSGETAEATRLKRTARRRYTRRKNRICYLQEIFSNEMAKVDDSFFHRLEE |
| | SpCas9 | SFLVEEDKKHERHPIFGNIVDEVAYHEKYPTIYHLRKKLVDSTDKADLRLIY |
| | | LALAHMIKFRGHFLIEGDLNPDNSDVDKLFIQLVQTYNQLFEENPINASGVD |
| | | AKAILSARLSKSRRLENLIAQLPGEKKNGLFGNLIALSLGLTPNFKSNFDLAE |
| | | DAKLQLSKDTYDDDLDNLLAQIGDQYADLFLAAKNLSDAILLSDILRVNTEI |
| | | TKAPLSASMIKRYDEHHQDLTLLKALVRQQLPEKYKEIFFDQSKNGYAGYI |
| | | DGGASQEEFYKFIKPILEKMDGTEELLVKLNREDLLRKQRTFDNGSIPHQIH |
| | | LGELHAILRRQEDFYPFLKDNREKIEKILTFRIPYYVGPLARGNSRFAWMTR |
| | | KSEETITPWNFEEVVDKGASAQSFIERMTNFDKNLPNEKVLPKHSLLYEYFT |
| | | VYNELTKVKYVTEGMRKPAFLSGEQKKAIVDLLFKTNRKVTVKQLKEDYF |
| | | KKIECFDSVEISGVEDRFNASLGTYHDLLKIIKDKDFLDNEENEDILEDIVLTL |
| | | TLFEDREMIEERLKTYAHLFDDKVMKQLKRRRYTGWGRLSRKLINGIRDK |
| | | QSGKTILDFLKSDGFANRNFMQLIHDDSLTFKEDIQKAQVSGQGDSLHEHIA |
| | | NLAGSPAIKKGILQTVKVVDELVKVMGRHKPENIVIEMARENQTTQKGQK |
| | | NSRERMKRIEEGIKELGSQILKEHPVENTQLQNEKLYLYYLQNGRDMYVDQ |
| | | ELDINRLSDYDVDAIVPQSFLKDDSIDNKVLTRSDKNRGKSDNVPSEEVVK |
| | | KMKNYWRQLLNAKLITQRKFDNLTKAERGGLSELDKAGFIKRQLVETRQIT |
| | | KHVAQILDSRMNTKYDENDKLIREVKVITLKSKLVSDFRKDFQFYKVREIN |
| | | NYHHAHDAYLNAVVGTALIKKYPKLESEFVYGDYKVYDVRKMIAKSEQEI |
| | | GKATAKYFFYSNIMNFFKTEITLANGEIRKRPLIETNGETGEIVWDKGRDFA |
| | | TVRKVLSMPQVNIVKKTEVQTGGFSKESILPKRNSDKLIARKKDWDPKKYG |
| | | GFVSPTVAYSVLVVAKVEKGKSKKLKSVKELLGITIMERSSFEKNPIDFLEA |
| | | KGYKEVKKDLIIKLPKYSLFELENGRKRMLASAGELQKGNELALPSKYVNF |
| | | LYLASHYEKLKGSPEDNEQKQLFVEQHKHYLDEIIEQISEFSKRVILADANL |
| | | DKVLSAYNKHRDKPIREQAENIIHLFTLTNLGAPAAFKYFDTTIDRKQYRST |
| | | KEVLDATLIHQSITGLYETRIDLSQLGGD |
| 7 | inactive | MDKKYSIGLAIGTNSVGWAVITDEYKVPSKKFKVLGNTDRHSIKKNLIGAL |
| | SPG | LFDSGETAEATRLKRTARRRYTRRKNRICYLQEIFSNEMAKVDDSFFHRLEE |
| | SpCas9 | SFLVEEDKKHERHPIFGNIVDEVAYHEKYPTIYHLRKKLVDSTDKADLRLIY |
| | | LALAHMIKFRGHFLIEGDLNPDNSDVDKLFIQLVQTYNQLFEENPINASGVD |
| | | AKAILSARLSKSRRLENLIAQLPGEKKNGLFGNLIALSLGLTPNFKSNFDLAE |
| | | DAKLQLSKDTYDDDLDNLLAQIGDQYADLFLAAKNLSDAILLSDILRVNTEI |
| | | TKAPLSASMIKRYDEHHQDLTLLKALVRQQLPEKYKEIFFDQSKNGYAGYI |
| | | DGGASQEEFYKFIKPILEKMDGTEELLVKLNREDLLRKQRTFDNGSIPHQIH |
| | | LGELHAILRRQEDFYPFLKDNREKIEKILTFRIPYYVGPLARGNSRFAWMTR |
| | | KSEETITPWNFEEVVDKGASAQSFIERMTNFDKNLPNEKVLPKHSLLYEYFT |
| | | VYNELTKVKYVTEGMRKPAFLSGEQKKAIVDLLFKTNRKVTVKQLKEDYF |
| | | KKIECFDSVEISGVEDRFNASLGTYHDLLKIIKDKDFLDNEENEDILEDIVLTL |
| | | TLFEDREMIEERLKTYAHLFDDKVMKQLKRRRYTGWGRLSRKLINGIRDK |
| | | QSGKTILDFLKSDGFANRNFMQLIHDDSLTFKEDIQKAQVSGQGDSLHEHIA |
| | | NLAGSPAIKKGILQTVKVVDELVKVMGRHKPENIVIEMARENQTTQKGQK |
| | | NSRERMKRIEEGIKELGSQILKEHPVENTQLQNEKLYLYYLQNGRDMYVDQ |
| | | ELDINRLSDYDVDAIVPQSFLKDDSIDNKVLTRSDKNRGKSDNVPSEEVVK |
| | | KMKNYWRQLLNAKLITQRKFDNLTKAERGGLSELDKAGFIKRQLVETRQIT |
| | | KHVAQILDSRMNTKYDENDKLIREVKVITLKSKLVSDFRKDFQFYKVREIN |
| | | NYHHAHDAYLNAVVGTALIKKYPKLESEFVYGDYKVYDVRKMIAKSEQEI |
| | | GKATAKYFFYSNIMNFFKTEITLANGEIRKRPLIETNGETGEIVWDKGRDFA |
| | | TVRKVLSMPQVNIVKKTEVQTGGFSKESILPKRNSDKLIARKKDWDPKKYG |
| | | GFLWPTVAYSVLVVAKVEKGKSKKLKSVKELLGITIMERSSFEKNPIDFLEA |
| | | KGYKEVKKDLIIKLPKYSLFELENGRKRMLASAKQLQKGNELALPSKYVNF |
| | | LYLASHYEKLKGSPEDNEQKQLFVEQHKHYLDEIIEQISEFSKRVILADANL |
| | | DKVLSAYNKHRDKPIREQAENIIHLFTLTNLGAPAAFKYFDTTIDRKQYRST |
| | | KEVLDATLIHQSITGLYETRIDLSQLGGD |
| 8 | inactive | MDKKYSIGLAIGTNSVGWAVITDEYKVPSKKFKVLGNTDRHSIKKNLIGAL |
| | SpRY Cas9 | LFDSGETAERTRLKRTARRRYTRRKNRICYLQEIFSNEMAKVDDSFFHRLEE |
| | | SFLVEEDKKHERHPIFGNIVDEVAYHEKYPTIYHLRKKLVDSTDKADLRLIY |
| | | LALAHMIKFRGHFLIEGDLNPDNSDVDKLFIQLVQTYNQLFEENPINASGVD |
| | | AKAILSARLSKSRRLENLIAQLPGEKKNGLFGNLIALSLGLTPNFKSNFDLAE |
| | | DAKLQLSKDTYDDDLDNLLAQIGDQYADLFLAAKNLSDAILLSDILRVNTEI |
| | | TKAPLSASMIKRYDEHHQDLTLLKALVRQQLPEKYKEIFFDQSKNGYAGYI |
| | | DGGASQEEFYKFIKPILEKMDGTEELLVKLNREDLLRKQRTFDNGSIPHQIH |
| | | LGELHAILRRQEDFYPFLKDNREKIEKILTFRIPYYVGPLARGNSRFAWMTR |
| | | KSEETITPWNFEEVVDKGASAQSFIERMTNFDKNLPNEKVLPKHSLLYEYFT |
| | | VYNELTKVKYVTEGMRKPAFLSGEQKKAIVDLLFKTNRKVTVKQLKEDYF |
| | | KKIECFDSVEISGVEDRFNASLGTYHDLLKIIKDKDFLDNEENEDILEDIVLTL |
| | | TLFEDREMIEERLKTYAHLFDDKVMKQLKRRRYTGWGRLSRKLINGIRDK |
| | | QSGKTILDFLKSDGFANRNFMQLIHDDSLTFKEDIQKAQVSGQGDSLHEHIA |
| | | NLAGSPAIKKGILQTVKVVDELVKVMGRHKPENIVIEMARENQTTQKGQK |
| | | NSRERMKRIEEGIKELGSQILKEHPVENTQLQNEKLYLYYLQNGRDMYVDQ |
| | | ELDINRLSDYDVDAIVPQSFLKDDSIDNKVLTRSDKNRGKSDNVPSEEVVK |
| | | KMKNYWRQLLNAKLITQRKFDNLTKAERGGLSELDKAGFIKRQLVETRQIT |
| | | KHVAQILDSRMNTKYDENDKLIREVKVITLKSKLVSDFRKDFQFYKVREIN |
| | | NYHHAHDAYLNAVVGTALIKKYPKLESEFVYGDYKVYDVRKMIAKSEQEI |
| | | GKATAKYFFYSNIMNFFKTEITLANGEIRKRPLIETNGETGEIVWDKGRDFA |
| | | TVRKVLSMPQVNIVKKTEVQTGGFSKESIRPKRNSDKLIARKKDWDPKKYG |
| | | GFLWPTVAYSVLVVAKVEKGKSKKLKSVKELLGITIMERSSFEKNPIDFLEA |
| | | KGYKEVKKDLIIKLPKYSLFELENGRKRMLASAKQLQKGNELALPSKYVNF |
| | | LYLASHYEKLKGSPEDNEQKQLFVEQHKHYLDEIIEQISEFSKRVILADANL |
| | | DKVLSAYNKHRDKPIREQAENIIHLFTLTRLGAPRAFKYFDTTIDPKQYRST |
| | | KEVLDATLIHQSITGLYETRIDLSQLGGD |
| 9 | SaCas9 | MKRNYILGLDIGITSVGYGIIDYETRDVIDAGVRLFKEANVENNEGRRSKRG |
| | | ARRLKRRRRHRIQRVKKLLFDYNLLTDHSELSGINPYEARVKGLSQKLSEEE |
| | | FSAALLHLAKRRGVHNVNEVEEDTGNELSTKEQISRNSKALEEKYVAELQL |
| | | ERLKKDGEVRGSINRFKTSDYVKEAKQLLKVQKAYHQLDQSFIDTYIDLLE |
| | | TRRTYYEGPGEGSPFGWKDIKEWYEMLMGHCTYFPEELRSVKYAYNADLY |
| | | NALNDLNNLVITRDENEKLEYYEKFQIIENVFKQKKKPTLKQIAKEILVNEE |
| | | DIKGYRVTSTGKPEFTNLKVYHDIKDITARKEIIENAELLDQIAKILTIYQSSE |
| | | DIQEELTNLNSELTQEEIEQISNLKGYTGTHNLSLKAINLILDELWHTNDNQI |
| | | AIFNRLKLVPKKVDLSQQKEIPTTLVDDFILSPVVKRSFIQSIKVINAIIKKYG |
| | | LPNDIIIELAREKNSKDAQKMINEMQKRNRQTNERIEEIIRTTGKENAKYLIE |
| | | KIKLHDMQEGKCLYSLEAIPLEDLLNNPFNYEVDHIIPRSVSFDNSFNNKVL |
| | | VKQEEASKKGNRTPFQYLSSSDSKISYETFKKHILNLAKGKGRISKTKKEYL |
| | | LEERDINRFSVQKDFINRNLVDTRYATRGLMNLLRSYFRVNNLDVKVKSIN |
| | | GGFTSFLRRKWKFKKERNKGYKHHAEDALIIANADFIFKEWKKLDKAKKV |
| | | MENQMFEEKQAESMPEIETEQEYKEIFITPHQIKHIKDFKDYKYSHRVDKKP |
| | | NRELINDTLYSTRKDDKGNTLIVNNLNGLYDKDNDKLKKLINKSPEKLLMY |
| | | HHDPQTYQKLKLIMEQYGDEKNPLYKYYEETGNYLTKYSKKDNGPVIKKI |
| | | KYYGNKLNAHLDITDDYPNSRNKVVKLSLKPYRFDVYLDNGVYKFVTVK |
| | | NLDVIKKENYYEVNSKAYEEAKKLKKISNQAEFIASFYNNDLIKINGELYRV |
| | | IGVNNDLLNRIEVNMIDITYREYLENMNDKRPPRIIKTIASKTQSIKKYSTDIL |
| | | GNLYEVKSKKHPQIIKKG |
| 10 | inactive | MKRNYILGLAIGITSVGYGIIDYETRDVIDAGVRLFKEANVENNEGRRSKRG |
| | KKH | ARRLKRRRRHRIQRVKKLLFDYNLLTDHSELSGINPYEARVKGLSQKLSEEE |
| | dSaCas9 | FSAALLHLAKRRGVHNVNEVEEDTGNELSTKEQISRNSKALEEKYVAELQL |
| | | ERLKKDGEVRGSINRFKTSDYVKEAKQLLKVQKAYHQLDQSFIDTYIDLLE |
| | | TRRTYYEGPGEGSPFGWKDIKEWYEMLMGHCTYFPEELRSVKYAYNADLY |
| | | NALNDLNNLVITRDENEKLEYYEKFQIIENVFKQKKKPTLKQIAKEILVNEE |
| | | DIKGYRVTSTGKPEFTNLKVYHDIKDITARKEIIENAELLDQIAKILTIYQSSE |
| | | DIQEELTNLNSELTQEEIEQISNLKGYTGTHNLSLKAINLILDELWHTNDNQI |
| | | AIFNRLKLVPKKVDLSQQKEIPTTLVDDFILSPVVKRSFIQSIKVINAIIKKYG |
| | | LPNDIIIELAREKNSKDAQKMINEMQKRNRQTNERIEEIIRTTGKENAKYLIE |
| | | KIKLHDMQEGKCLYSLEAIPLEDLLNNPFNYEVDHIIPRSVSFDNSFNNKVL |
| | | VKQEEASKKGNRTPFQYLSSSDSKISYETFKKHILNLAKGKGRISKTKKEYL |
| | | LEERDINRFSVQKDFINRNLVDTRYATRGLMNLLRSYFRVNNLDVKVKSIN |
| | | GGFTSFLRRKWKFKKERNKGYKHHAEDALIIANADFIFKEWKKLDKAKKV |
| | | MENQMFEEKQAESMPEIETEQEYKEIFITPHQIKHIKDFKDYKYSHRVDKKP |
| | | NRKLINDTLYSTRKDDKGNTLIVNNLNGLYDKDNDKLKKLINKSPEKLLMY |
| | | HHDPQTYQKLKLIMEQYGDEKNPLYKYYEETGNYLTKYSKKDNGPVIKKI |
| | | KYYGNKLNAHLDITDDYPNSRNKVVKLSLKPYRFDVYLDNGVYKFVTVK |
| | | NLDVIKKENYYEVNSKCYEEAKKLKKISNQAEFIASFYKNDLIKINGELYRV |
| | | IGVNNDLLNRIEVNMIDITYREYLENMNDKRPPHIIKTIASKTQSIKKYSTDIL |
| | | GNLYEVKSKKHPQIIKKG |
| 11 | dNmeCas9 | MAAFKPNSINYILGLAIGIASVGWAMVEIDEEENPIRLIDLGVRVFERAEVPK |
| | | TGDSLAMARRLARSVRRLTRRRAHRLLRTRRLLKREGVLQAANFDENGLI |
| | | KSLPNTPWQLRAAALDRKLTPLEWSAVLLHLIKHRGYLSQRKNEGETADK |
| | | ELGALLKGVAGNAHALQTGDFRTPAELALNKFEKESGHIRNQRSDYSHTFS |
| | | RKDLQAELILLFEKQKEFGNPHVSGGLKEGIETLLMTQRPALSGDAVQKML |
| | | GHCTFEPAEPKAAKNTYTAERFIWLTKLNNLRILEQGSERPLTDTERATLMD |
| | | EPYRKSKLTYAQARKLLGLEDTAFFKGLRYGKDNAEASTLMEMKAYHAIS |
| | | RALEKEGLKDKKSPLNLSPELQDEIGTAFSLFKTDEDITGRLKDRIQPEILEA |
| | | LLKHISFDKFVQISLKALRRIVPLMEQGKRYDEACAEIYGDHYGKKNTEEKI |
| | | YLPPIPADEIRNPVVLRALSQARKVINGVVRRYGSPARIHIETAREVGKSFKD |
| | | RKEIEKRQEENRKDREKAAAKFREYFPNFVGEPKSKDILKLRLYEQQHGKC |
| | | LYSGKEINLGRLNEKGYVEIDAALPFSRTWDDSFNNKVLVLGSENQNKGNQ |
| | | TPYEYFNGKDNSREWQEFKARVETSRFPRSKKQRILLQKFDEDGFKERNLN |
| | | DTRYVNRFLCQFVADRMRLTGKGKKRVFASNGQITNLLRGFWGLRKVRAE |
| | | NDRHHALDAVVVACSTVAMQQKITRFVRYKEMNAFDGKTIDKETGEVLH |
| | | QKTHFPQPWEFFAQEVMIRVFGKPDGKPEFEEADTLEKLRTLLAEKLSSRPE |
| | | AVHEYVTPLFVSRAPNRKMSGQGHMETVKSAKRLDEGVSVLRVPLTQLKL |
| | | KDLEKMVNREREPKLYEALKARLEAHKDDPAKAFAEPFYKYDKAGNRTQ |
| | | QVKAVRVEQVQKTGVWVRNHNGIADNATMVRVDVFEKGDKYYLVPIYS |
| | | WQVAKGILPDRAVVQGKDEEDWQLIDDSFNFKFSLHPNDLVEVITKKARM |
| | | FGYFASCHRGTGNINIRIHDLDHKIGKNGILEGIGVKTALSFQKYQIDELGKE |
| | | IRPCRLKKRPPVR |
| 12 | dCjCas9 | MARILAFAIGISSIGWAFSENDELKDCGVRIFTKVENPKTGESLALPRRLARS |
| | | ARKRLARRKARLNHLKHLIANEFKLNYEDYQSFDESLAKAYKGSLISPYEL |
| | | RFRALNELLSKQDFARVILHIAKRRGYDDIKNSDDKEKGAILKAIKQNEEKL |
| | | ANYQSVGEYLYKEYFQKFKENSKEFTNVRNKKESYERCIAQSFLKDELKLIF |
| | | KKQREFGFSFSKKFEEEVLSVAFYKRALKDFSHLVGNCSFFTDEKRAPKNSP |
| | | LAFMFVALTRIINLLNNLKNTEGILYTKDDLNALLNEVLKNGTLTYKQTKK |
| | | LLGLSDDYEFKGEKGTYFIEFKKYKEFIKALGEHNLSQDDLNEIAKDITLIKD |
| | | EIKLKKALAKYDLNQNQIDSLSKLEFKDHLNISFKALKLVTPLMLEGKKYD |
| | | EACNELNLKVAINEDKKDFLPAFNETYYKDEVTNPVVLRAIKEYRKVLNAL |
| | | LKKYGKVHKINIELAREVGKNHSQRAKIEKEQNENYKAKKDAELECEKLG |
| | | LKINSKNILKLRLFKEQKEFCAYSGEKIKISDLQDEKMLEIDAIYPYSRSFDDS |
| | | YMNKVLVFTKQNQEKLNQTPFEAFGNDSAKWQKIEVLAKNLPTKKQKRIL |
| | | DKNYKDKEQKNFKDRNLNDTRYIARLVLNYTKDYLDFLPLSDDENTKLND |
| | | TQKGSKVHVEAKSGMLTSALRHTWGFSAKDRNNHLHHAIDAVIIAYANNSI |
| | | VKAFSDFKKEQESNSAELYAKKISELDYKNKRKFFEPFSGFRQKVLDKIDEI |
| | | FVSKPERKKPSGALHEETFRKEEEFYQSYGGKEGVLKALELGKIRKVNGKI |
| | | VKNGDMFRVDIFKHKKTNKFYAVPIYTMDFALKVLPNKAVARSKKGEIKD |
| | | WILMDENYEFCFSLYKDSLILIQTKDMQEPEFVYYNAFTSSTVSLIVSKHDN |
| | | KFETLSKNQKILFKNANEKEVIAKSIGIQNLKVFEKYIVSALGEVTKAEFRQR |
| | | EDFKK |
| 13 | dSt1Cas9 | MGSDLVLGLAIGIGSVGVGILNKVTGEIIHKNSRIFPAAQAENNLVRRTNRQ |
| | | GRRLARRKKHRRVRLNRLFEESGLITDFTKISINLNPYQLRVKGLTDELSNE |
| | | ELFIALKNMVKHRGISYLDDASDDGNSSVGDYAQIVKENSKQLETKTPGQI |
| | | QLERYQTYGQLRGDFTVEKDGKKHRLINVFPTSAYRSEALRILQTQQEFNP |
| | | QITDEFINRYLEILTGKRKYYHGPGNEKSRTDYGRYRTSGETLDNIFGILIGK |
| | | CTFYPDEFRAAKASYTAQEFNLLNDLNNLTVPTETKKLSKEQKNQIINYVK |
| | | NEKAMGPAKLFKYIAKLLSCDVADIKGYRIDKSGKAEIHTFEAYRKMKTLE |
| | | TLDIEQMDRETLDKLAYVLTLNTEREGIQEALEHEFADGSFSQKQVDELVQ |
| | | FRKANSSIFGKGWHNFSVKLMMELIPELYETSEEQMTILTRLGKQKTTSSSN |
| | | KTKYIDEKLLTEEIYNPVVAKSVRQAIKIVNAAIKEYGDFDNIVIEMARETNE |
| | | DDEKKAIQKIQKANKDEKDAAMLKAANQYNGKAELPHSVFHGHKQLATK |
| | | IRLWHQQGERCLYTGKTISIHDLINNSNQFEVDAILPLSITFDDSLANKVLVY |
| | | ATANQEKGQRTPYQALDSMDDAWSFRELKAFVRESKTLSNKKKEYLLTEE |
| | | DISKFDVRKKFIERNLVDTRYASRVVLNALQEHFRAHKIDTKVSVVRGQFT |
| | | SQLRRHWGIEKTRDTYHHHAVDALIIAASSQLNLWKKQKNTLVSYSEDQLL |
| | | DIETGELISDDEYKESVFKAPYQHFVDTLKSKEFEDSILFSYQVDSKFNRKIS |
| | | DATIYATRQAKVGKDKADETYVLGKIKDIYTQDGYDAFMKIYKKDKSKFL |
| | | MYRHDPQTFEKVIEPILENYPNKQINEKGKEVPCNPFLKYKEEHGYIRKYSK |
| | | KGNGPEIKSLKYYDSKLGNHIDITPKDSNNKVVLQSVSPWRADVYFNKTTG |
| | | KYEILGLKYADLQFEKGTGTYKISQEKYNDIKKKEGVDSDSEFKFTLYKND |
| | | LLLVKDTETKEQQLFRFLSRTMPKQKHYVELKPYDKQKFEGGEALIKVLGN |
| | | VANSGQCKKGLGKSNISIYKVRTDVLGNQHIIKNEGDKPKLDF |
| 14 | dSt3Cas9 | MTKPYSIGLAIGTNSVGWAVITDNYKVPSKKMKVLGNTSKKYIKKNLLGV |
| | | LLFDSGITAEGRRLKRTARRRYTRRRNRILYLQEIFSTEMATLDDAFFQRLD |
| | | DSFLVPDDKRDSKYPIFGNLVEEKVYHDEFPTIYHLRKYLADSTKKADLRL |
| | | VYLALAHMIKYRGHFLIEGEFNSKNNDIQKNFQDFLDTYNAIFESDLSLENS |
| | | KQLEEIVKDKISKLEKKDRILKLFPGEKNSGIFSEFLKLIVGNQADFRKCFNL |
| | | DEKASLHFSKESYDEDLETLLGYIGDDYSDVFLKAKKLYDAILLSGFLTVTD |
| | | NETEAPLSSAMIKRYNEHKEDLALLKEYIRNISLKTYNEVFKDDTKNGYAG |
| | | YIDGKTNQEDFYVYLKNLLAEFEGADYFLEKIDREDFLRKQRTFDNGSIPYQ |
| | | IHLQEMRAILDKQAKFYPFLAKNKERIEKILTFRIPYYVGPLARGNSDFAWSI |
| | | RKRNEKITPWNFEDVIDKESSAEAFINRMTSFDLYLPEEKVLPKHSLLYETF |
| | | NVYNELTKVRFIAESMRDYQFLDSKQKKDIVRLYFKDKRKVTDKDIIEYLH |
| | | AIYGYDGIELKGIEKQFNSSLSTYHDLLNIINDKEFLDDSSNEAIIEEIIHTLTIF |
| | | EDREMIKQRLSKFENIFDKSVLKKLSRRHYTGWGKLSAKLINGIRDEKSGNT |
| | | ILDYLIDDGISNRNFMQLIHDDALSFKKKIQKAQIIGDEDKGNIKEVVKSLPG |
| | | SPAIKKGILQSIKIVDELVKVMGGRKPESIVVEMARENQYTNQGKSNSQQRL |
| | | KRLEKSLKELGSKILKENIPAKLSKIDNNALQNDRLYLYYLQNGKDMYTGD |
| | | DLDIDRLSNYDIDHIIPQAFLKDNSIDNKVLVSSASARGKSDDFPSLEVVKKR |
| | | KTFWYQLLKSKLISQRKFDNLTKAERGGLLPEDKAGFIQRQLVETRQITKH |
| | | VARLLDEKFNNKKDENNRAVRTVKIITLKSTLVSQFRKDFELYKVREINDFH |
| | | HAHDAYLNAVIASALLKKYPKLEPEFVYGDYPKYNSFRERKSATEKVYFYS |
| | | NIMNIFKKSISLADGRVIERPLIEVNEETGESVWNKESDLATVRRVLSYPQV |
| | | NVVKKVEEQNHGLDRGKPKGLFNANLSSKPKPNSNENLVGAKEYLDPKKY |
| | | GGYAGISNSFAVLVKGTIEKGAKKKITNVLEFQGISILDRINYRKDKLNFLLE |
| | | KGYKDIELIIELPKYSLFELSDGSRRMLASILSTNNKRGEIHKGNQIFLSQKFV |
| | | KLLYHAKRISNTINENHRKYVENHKKEFEELFYYILEFNENYVGAKKNGKL |
| | | LNSAFQSWQNHSIDELCSSFIGPTGSERKGLFELTSRGSAADFEFLGVKIPRY |
| | | RDYTPSSLLKDATLIHQSVTGLYETRIDLAKLGEG |
| 15 | F. novicida | MSIYQEFVNKYSLSKTLRFELIPQGKTLENIKARGLILDDEKRAKDYKKAKQ |
| | WT Cpf1 | IIDKYHQFFIEEILSSVCISEDLLQNYSDVYFKLKKSDDDNLQKDFKSAKDTI |
| | | KKQISEYIKDSEKFKNLFNQNLIDAKKGQESDLILWLKQSKDNGIELFKANS |
| | | DITDIDEALEIIKSFKGWTTYFKGFHENRKNVYSSNDIPTSIIYRIVDDNLPKF |
| | | LENKAKYESLKDKAPEAINYEQIKKDLAEELTFDIDYKTSEVNQRVFSLDEV |
| | | FEIANFNNYLNQSGITKFNTIIGGKFVNGENTKRKGINEYINLYSQQINDKTL |
| | | KKYKMSVLFKQILSDTESKSFVIDKLEDDSDVVTTMQSFYEQIAAFKTVEEK |
| | | SIKETLSLLFDDLKAQKLDLSKIYFKNDKSLTDLSQQVFDDYSVIGTAVLEYI |
| | | TQQIAPKNLDNPSKKEQELIAKKTEKAKYLSLETIKLALEEFNKHRDIDKQC |
| | | RFEEILANFAAIPMIFDEIAQNKDNLAQISIKYQNQGKKDLLQASAEDDVKAI |
| | | KDLLDQTNNLLHKLKIFHISQSEDKANILDKDEHFYLVFEECYFELANIVPL |
| | | YNKIRNYITQKPYSDEKFKLNFENSTLANGWDKNKEPDNTAILFIKDDKYY |
| | | LGVMNKKNNKIFDDKAIKENKGEGYKKIVYKLLPGANKMLPKVFFSAKSIK |
| | | FYNPSEDILRIRNHSTHTKNGSPQKGYEKFEFNIEDCRKFIDFYKQSISKHPE |
| | | WKDFGFRFSDTQRYNSIDEFYREVENQGYKLTFENISESYIDSVVNQGKLYL |
| | | FQIYNKDFSAYSKGRPNLHTLYWKALFDERNLQDVVYKLNGEAELFYRKQ |
| | | SIPKKITHPAKEAIANKNKDNPKKESVFEYDLIKDKRFTEDKFFFHCPITINFK |
| | | SSGANKFNDEINLLLKEKANDVHILSIDRGERHLAYYTLVDGKGNIIKQDTF |
| | | NIIGNDRMKTNYHDKLAAIEKDRDSARKDWKKINNIKEMKEGYLSQVVHEI |
| | | AKLVIEYNAIVVFEDLNFGFKRGRFKVEKQVYQKLEKMLIEKLNYLVFKDN |
| | | EFDKTGGVLRAYQLTAPFETFKKMGKQTGIIYYVPAGFTSKICPVTGFVNQL |
| | | YPKYESVSKSQEFFSKFDKICYNLDKGYFEFSFDYKNFGDKAAKGKWTIAS |
| | | FGSRLINFRNSDKNHNWDTREVYPTKELEKLLKDYSIEYGHGECIKAAICGE |
| | | SDKKFFAKLTSVLNTILQMRNSKTGTELDYLISPVADVNGNFFDSRQAPKN |
| | | MPQDADANGAYHIGLKGLMLLGRIKNNQEGKKLNLVIKNEEYFEFVQNRN |
| | | N |
| 16 | inactive | MSIYQEFVNKYSLSKTLRFELIPQGKTLENIKARGLILDDEKRAKDYKKAKQ |
| | FnCpf1 | IIDKYHQFFIEEILSSVCISEDLLQNYSDVYFKLKKSDDDNLQKDFKSAKDTI |
| | | KKQISEYIKDSEKFKNLFNQNLIDAKKGQESDLILWLKQSKDNGIELFKANS |
| | | DITDIDEALEIIKSFKGWTTYFKGFHENRKNVYSSNDIPTSIIYRIVDDNLPKF |
| | | LENKAKYESLKDKAPEAINYEQIKKDLAEELTFDIDYKTSEVNQRVFSLDEV |
| | | FEIANFNNYLNQSGITKFNTIIGGKFVNGENTKRKGINEYINLYSQQINDKTL |
| | | KKYKMSVLFKQILSDTESKSFVIDKLEDDSDVVTTMQSFYEQIAAFKTVEEK |
| | | SIKETLSLLFDDLKAQKLDLSKIYFKNDKSLTDLSQQVEDDYSVIGTAVLEYI |
| | | TQQIAPKNLDNPSKKEQELIAKKTEKAKYLSLETIKLALEEFNKHRDIDKQC |
| | | RFEEILANFAAIPMIFDEIAQNKDNLAQISIKYQNQGKKDLLQASAEDDVKAI |
| | | KDLLDQTNNLLHKLKIFHISQSEDKANILDKDEHFYLVFEECYFELANIVPL |
| | | YNKIRNYITQKPYSDEKFKLNFENSTLANGWDKNKEPDNTAILFIKDDKYY |
| | | LGVMNKKNNKIFDDKAIKENKGEGYKKIVYKLLPGANKMLPKVFFSAKSIK |
| | | FYNPSEDILRIRNHSTHTKNGSPQKGYEKFEFNIEDCRKFIDFYKQSISKHPE |
| | | WKDFGFRFSDTQRYNSIDEFYREVENQGYKLTFENISESYIDSVVNQGKLYL |
| | | FQIYNKDFSAYSKGRPNLHTLYWKALFDERNLQDVVYKLNGEAELFYRKQ |
| | | SIPKKITHPAKEAIANKNKDNPKKESVFEYDLIKDKRFTEDKFFFHCPITINFK |
| | | SSGANKFNDEINLLLKEKANDVHILSIARGERHLAYYTLVDGKGNIIKQDTF |
| | | NIIGNDRMKTNYHDKLAAIEKDRDSARKDWKKINNIKEMKEGYLSQVVHEI |
| | | AKLVIEYNAIVVFEDLNFGFKRGRFKVEKQVYQKLEKMLIEKLNYLVFKDN |
| | | EFDKTGGVLRAYQLTAPFETFKKMGKQTGIIYYVPAGFTSKICPVTGFVNQL |
| | | YPKYESVSKSQEFFSKFDKICYNLDKGYFEFSFDYKNFGDKAAKGKWTIAS |
| | | FGSRLINFRNSDKNHNWDTREVYPTKELEKLLKDYSIEYGHGECIKAAICGE |
| | | SDKKFFAKLTSVLNTILQMRNSKTGTELDYLISPVADVNGNFFDSRQAPKN |
| | | MPQDADANGAYHIGLKGLMLLGRIKNNQEGKKLNLVIKNEEYFEFVQNRN |
| | | N |
| 17 | inactive | MSKLEKFTNCYSLSKTLRFKAIPVGKTQENIDNKRLLVEDEKRAEDYKGVK |
| | dLbCpf1 | KLLDRYYLSFINDVLHSIKLKNLNNYISLFRKKTRTEKENKELENLEINLRKE |
| | | IAKAFKGNEGYKSLFKKDIIETILPEFLDDKDEIALVNSFNGFTTAFTGFFDN |
| | | RENMFSEEAKSTSIAFRCINENLTRYISNMDIFEKVDAIFDKHEVQEIKEKILN |
| | | SDYDVEDFFEGEFFNFVLTQEGIDVYNAIIGGFVTESGEKIKGLNEYINLYNQ |
| | | KTKQKLPKFKPLYKQVLSDRESLSFYGEGYTSDEEVLEVFRNTLNKNSEIFS |
| | | SIKKLEKLFKNFDEYSSAGIFVKNGPAISTISKDIFGEWNVIRDKWNAEYDDI |
| | | HLKKKAVVTEKYEDDRRKSFKKIGSFSLEQLQEYADADLSVVEKLKEIIIQK |
| | | VDEIYKVYGSSEKLFDADFVLEKSLKKNDAVVAIMKDLLDSVKSFENYIKA |
| | | FFGEGKETNRDESFYGDFVLAYDILLKVDHIYDAIRNYVTQKPYSKDKFKL |
| | | YFQNPQFMGGWDKDKETDYRATILRYGSKYYLAIMDKKYAKCLQKIDKD |
| | | DVNGNYEKINYKLLPGPNKMLPKVFFSKKWMAYYNPSEDIQKIYKNGTFK |
| | | KGDMFNLNDCHKLIDFFKDSISRYPKWSNAYDFNFSETEKYKDIAGFYREV |
| | | EEQGYKVSFESASKKEVDKLVEEGKLYMFQIYNKDFSDKSHGTPNLHTMY |
| | | FKLLFDENNHGQIRLSGGAELFMRRASLKKEELVVHPANSPIANKNPDNPK |
| | | KTTTLSYDVYKDKRFSEDQYELHIPIAINKCPKNIFKINTEVRVLLKHDDNPY |
| | | VIGIARGERNLLYIVVVDGKGNIVEQYSLNEIINNFNGIRIKTDYHSLLDKKE |
| | | KERFEARQNWTSIENIKELKAGYISQVVHKICELVEKYDAVIALEDLNSGFK |
| | | NSRVKVEKQVYQKFEKMLIDKLNYMVDKKSNPCATGGALKGYQITNKFES |
| | | FKSMSTQNGFIFYIPAWLTSKIDPSTGFVNLLKTKYTSIADSKKFISSFDRIMY |
| | | VPEEDLFEFALDYKNFSRTDADYIKKWKLYSYGNRIRIFRNPKKNNVFDWE |
| | | EVCLTSAYKELFNKYGINYQQGDIRALLCEQSDKAFYSSFMALMSLMLQM |
| | | RNSITGRTDVDFLISPVKNSDGIFYDSRNYEAQENAILPKNADANGAYNIAR |
| | | KVLWAIGQFKKAEDEKLDKVKIAISNKEWLEYAQTSVKH |
| 18 | inactive | MTQFEGFTNLYQVSKTLRFELIPQGKTLKHIQEQGFIEEDKARNDHYKELKP |
| | AsCpf1 | IIDRIYKTYADQCLQLVQLDWENLSAAIDSYRKEKTEETRNALIEEQATYRN |
| | | AIHDYFIGRTDNLTDAINKRHAEIYKGLFKAELFNGKVLKQLGTVTTTEHEN |
| | | ALLRSFDKFTTYFSGFYENRKNVFSAEDISTAIPHRIVQDNFPKFKENCHIFT |
| | | RLITAVPSLREHFENVKKAIGIFVSTSIEEVFSFPFYNQLLTQTQIDLYNQLLG |
| | | GISREAGTEKIKGLNEVLNLAIQKNDETAHIIASLPHRFIPLFKQILSDRNTLSF |
| | | ILEEFKSDEEVIQSFCKYKTLLRNENVLETAEALFNELNSIDLTHIFISHKKLE |
| | | TISSALCDHWDTLRNALYERRISELTGKITKSAKEKVQRSLKHEDINLQEIIS |
| | | AAGKELSEAFKQKTSEILSHAHAALDQPLPTTLKKQEEKEILKSQLDSLLGL |
| | | YHLLDWFAVDESNEVDPEFSARLTGIKLEMEPSLSFYNKARNYATKKPYSV |
| | | EKFKLNFQMPTLASGWDVNKEKNNGAILFVKNGLYYLGIMPKQKGRYKA |
| | | LSFEPTEKTSEGFDKMYYDYFPDAAKMIPKCSTQLKAVTAHFQTHTTPILLS |
| | | NNFIEPLEITKEIYDLNNPEKEPKKFQTAYAKKTGDQKGYREALCKWIDFTR |
| | | DFLSKYTKTTSIDLSSLRPSSQYKDLGEYYAELNPLLYHISFQRIAEKEIMDA |
| | | VETGKLYLFQIYNKDFAKGHHGKPNLHTLYWTGLFSPENLAKTSIKLNGQA |
| | | ELFYRPKSRMKRMAHRLGEKMLNKKLKDQKTPIPDTLYQELYDYVNHRLS |
| | | HDLSDEARALLPNVITKEVSHEIIKDRRFTSDKFFFHVPITLNYQAANSPSKF |
| | | NQRVNAYLKEHPETPIIGIARGERNLIYITVIDSTGKILEQRSLNTIQQFDYQK |
| | | KLDNREKERVAARQAWSVVGTIKDLKQGYLSQVIHEIVDLMIHYQAVVVL |
| | | ENLNFGFKSKRTGIAEKAVYQQFEKMLIDKLNCLVLKDYPAEKVGGVLNP |
| | | YQLTDQFTSFAKMGTQSGFLFYVPAPYTSKIDPLTGFVDPFVWKTIKNHESR |
| | | KHFLEGFDFLHYDVKTGDFILHFKMNRNLSFQRGLPGFMPAWDIVFEKNET |
| | | QFDAKGTPFIAGKRIVPVIENHRFTGRYRDLYPANELIALLEEKGIVFRDGSN |
| | | ILPKLLENDDSHAIDTMVALIRSVLQMRNSNAATGEDYINSPVRDLNGVCF |
| | | DSRFQNPEWPMDADANGAYHIALKGQLLLNHLKESKDLKLQNGISNQDWL |
| | | AYIQELRN |
| 19 | inactive | MTQFEGFTNLYQVSKTLRFELIPQGKTLKHIQEQGFIEEDKARNDHYKELKP |
| | enAsCpf1 | IIDRIYKTYADQCLQLVQLDWENLSAAIDSYRKEKTEETRNALIEEQATYRN |
| | | AIHDYFIGRTDNLTDAINKRHAEIYKGLFKAELFNGKVLKQLGTVTTTEHEN |
| | | ALLRSFDKFTTYFSGFYRNRKNVFSAEDISTAIPHRIVQDNFPKFKENCHIFT |
| | | RLITAVPSLREHFENVKKAIGIFVSTSIEEVFSFPFYNQLLTQTQIDLYNQLLG |
| | | GISREAGTEKIKGLNEVLNLAIQKNDETAHIIASLPHRFIPLFKQILSDRNTLSF |
| | | ILEEFKSDEEVIQSFCKYKTLLRNENVLETAEALFNELNSIDLTHIFISHKKLE |
| | | TISSALCDHWDTLRNALYERRISELTGKITKSAKEKVQRSLKHEDINLQEIIS |
| | | AAGKELSEAFKQKTSEILSHAHAALDQPLPTTLKKQEEKEILKSQLDSLLGL |
| | | YHLLDWFAVDESNEVDPEFSARLTGIKLEMEPSLSFYNKARNYATKKPYSV |
| | | EKFKLNFQMPTLARGWDVNREKNNGAILFVKNGLYYLGIMPKQKGRYKA |
| | | LSFEPTEKTSEGFDKMYYDYFPDAAKMIPKCSTQLKAVTAHFQTHTTPILLS |
| | | NNFIEPLEITKEIYDLNNPEKEPKKFQTAYAKKTGDQKGYREALCKWIDFTR |
| | | DFLSKYTKTTSIDLSSLRPSSQYKDLGEYYAELNPLLYHISFQRIAEKEIMDA |
| | | VETGKLYLFQIYNKDFAKGHHGKPNLHTLYWTGLFSPENLAKTSIKLNGQA |
| | | ELFYRPKSRMKRMAHRLGEKMLNKKLKDQKTPIPDTLYQELYDYVNHRLS |
| | | HDLSDEARALLPNVITKEVSHEIIKDRRFTSDKFFFHVPITLNYQAANSPSKF |
| | | NQRVNAYLKEHPETPIIGIARGERNLIYITVIDSTGKILEQRSLNTIQQFDYQK |
| | | KLDNREKERVAARQAWSVVGTIKDLKQGYLSQVIHEIVDLMIHYQAVVVL |
| | | ENLNFGFKSKRTGIAEKAVYQQFEKMLIDKLNCLVLKDYPAEKVGGVLNP |
| | | YQLTDQFTSFAKMGTQSGFLFYVPAPYTSKIDPLTGFVDPFVWKTIKNHESR |
| | | KHFLEGFDFLHYDVKTGDFILHFKMNRNLSFQRGLPGFMPAWDIVFEKNET |
| | | QFDAKGTPFIAGKRIVPVIENHRFTGRYRDLYPANELIALLEEKGIVFRDGSN |
| | | ILPKLLENDDSHAIDTMVALIRSVLQMRNSNAATGEDYINSPVRDLNGVCF |
| | | DSRFQNPEWPMDADANGAYHIALKGQLLLNHLKESKDLKLQNGISNQDWL |
| | | AYIQELRN |
| 20 | inactive | MTQFEGFTNLYQVSKTLRFELIPQGKTLKHIQEQGFIEEDKARNDHYKELKP |
| | HFAsCpf1 | IIDRIYKTYADQCLQLVQLDWENLSAAIDSYRKEKTEETRNALIEEQATYRN |
| | | AIHDYFIGRTDNLTDAINKRHAEIYKGLFKAELFNGKVLKQLGTVTTTEHEN |
| | | ALLRSFDKFTTYFSGFYRNRKNVFSAEDISTAIPHRIVQDNFPKFKENCHIFT |
| | | RLITAVPSLREHFENVKKAIGIFVSTSIEEVFSFPFYNQLLTQTQIDLYNQLLG |
| | | GISREAGTEKIKGLNEVLALAIQKNDETAHIIASLPHRFIPLFKQILSDRNTLSF |
| | | ILEEFKSDEEVIQSFCKYKTLLRNENVLETAEALFNELNSIDLTHIFISHKKLE |
| | | TISSALCDHWDTLRNALYERRISELTGKITKSAKEKVQRSLKHEDINLQEIIS |
| | | AAGKELSEAFKQKTSEILSHAHAALDQPLPTTLKKQEEKEILKSQLDSLLGL |
| | | YHLLDWFAVDESNEVDPEFSARLTGIKLEMEPSLSFYNKARNYATKKPYSV |
| | | EKFKLNFQMPTLARGWDVNREKNNGAILFVKNGLYYLGIMPKQKGRYKA |
| | | LSFEPTEKTSEGFDKMYYDYFPDAAKMIPKCSTQLKAVTAHFQTHTTPILLS |
| | | NNFIEPLEITKEIYDLNNPEKEPKKFQTAYAKKTGDQKGYREALCKWIDFTR |
| | | DFLSKYTKTTSIDLSSLRPSSQYKDLGEYYAELNPLLYHISFQRIAEKEIMDA |
| | | VETGKLYLFQIYNKDFAKGHHGKPNLHTLYWTGLFSPENLAKTSIKLNGQA |
| | | ELFYRPKSRMKRMAHRLGEKMLNKKLKDQKTPIPDTLYQELYDYVNHRLS |
| | | HDLSDEARALLPNVITKEVSHEIIKDRRFTSDKFFFHVPITLNYQAANSPSKF |
| | | NQRVNAYLKEHPETPIIGIARGERNLIYITVIDSTGKILEQRSLNTIQQFDYQK |
| | | KLDNREKERVAARQAWSVVGTIKDLKQGYLSQVIHEIVDLMIHYQAVVVL |
| | | ENLNFGFKSKRTGIAEKAVYQQFEKMLIDKLNCLVLKDYPAEKVGGVLNP |
| | | YQLTDQFTSFAKMGTQSGFLFYVPAPYTSKIDPLTGFVDPFVWKTIKNHESR |
| | | KHFLEGFDFLHYDVKTGDFILHFKMNRNLSFQRGLPGFMPAWDIVFEKNET |
| | | QFDAKGTPFIAGKRIVPVIENHRFTGRYRDLYPANELIALLEEKGIVFRDGSN |
| | | ILPKLLENDDSHAIDTMVALIRSVLQMRNSNAATGEDYINSPVRDLNGVCF |
| | | DSRFQNPEWPMDADANGAYHIALKGQLLLNHLKESKDLKLQNGISNQDWL |
| | | AYIQELRN |
| 21 | inactive | MTQFEGFTNLYQVSKTLRFELIPQGKTLKHIQEQGFIEEDKARNDHYKELKP |
| | RVRAsCpf1 | IIDRIYKTYADQCLQLVQLDWENLSAAIDSYRKEKTEETRNALIEEQATYRN |
| | | AIHDYFIGRTDNLTDAINKRHAEIYKGLFKAELFNGKVLKQLGTVTTTEHEN |
| | | ALLRSFDKFTTYFSGFYENRKNVFSAEDISTAIPHRIVQDNFPKFKENCHIFT |
| | | RLITAVPSLREHFENVKKAIGIFVSTSIEEVFSFPFYNQLLTQTQIDLYNQLLG |
| | | GISREAGTEKIKGLNEVLNLAIQKNDETAHIIASLPHRFIPLFKQILSDRNTLSF |
| | | ILEEFKSDEEVIQSFCKYKTLLRNENVLETAEALFNELNSIDLTHIFISHKKLE |
| | | TISSALCDHWDTLRNALYERRISELTGKITKSAKEKVQRSLKHEDINLQEIIS |
| | | AAGKELSEAFKQKTSEILSHAHAALDQPLPTTLKKQEEKEILKSQLDSLLGL |
| | | YHLLDWFAVDESNEVDPEFSARLTGIKLEMEPSLSFYNKARNYATKKPYSV |
| | | EKFKLNFQMPTLARGWDVNVEKNRGAILFVKNGLYYLGIMPKQKGRYKA |
| | | LSFEPTEKTSEGFDKMYYDYFPDAAKMIPKCSTQLKAVTAHFQTHTTPILLS |
| | | NNFIEPLEITKEIYDLNNPEKEPKKFQTAYAKKTGDQKGYREALCKWIDFTR |
| | | DFLSKYTKTTSIDLSSLRPSSQYKDLGEYYAELNPLLYHISFQRIAEKEIMDA |
| | | VETGKLYLFQIYNKDFAKGHHGKPNLHTLYWTGLFSPENLAKTSIKLNGQA |
| | | ELFYRPKSRMKRMAHRLGEKMLNKKLKDQKTPIPDTLYQELYDYVNHRLS |
| | | HDLSDEARALLPNVITKEVSHEIIKDRRFTSDKFFFHVPITLNYQAANSPSKF |
| | | NQRVNAYLKEHPETPIIGIARGERNLIYITVIDSTGKILEQRSLNTIQQFDYQK |
| | | KLDNREKERVAARQAWSVVGTIKDLKQGYLSQVIHEIVDLMIHYQAVVVL |
| | | ENLNFGFKSKRTGIAEKAVYQQFEKMLIDKLNCLVLKDYPAEKVGGVLNP |
| | | YQLTDQFTSFAKMGTQSGFLFYVPAPYTSKIDPLTGFVDPFVWKTIKNHESR |
| | | KHFLEGFDFLHYDVKTGDFILHFKMNRNLSFQRGLPGFMPAWDIVFEKNET |
| | | QFDAKGTPFIAGKRIVPVIENHRFTGRYRDLYPANELIALLEEKGIVFRDGSN |
| | | ILPKLLENDDSHAIDTMVALIRSVLQMRNSNAATGEDYINSPVRDLNGVCF |
| | | DSRFQNPEWPMDADANGAYHIALKGQLLLNHLKESKDLKLQNGISNQDWL |
| | | AYIQELRN |
| 22 | RRAsCpf1 | MTQFEGFTNLYQVSKTLRFELIPQGKTLKHIQEQGFIEEDKARNDHYKELKP |
| | | IIDRIYKTYADQCLQLVQLDWENLSAAIDSYRKEKTEETRNALIEEQATYRN |
| | | AIHDYFIGRTDNLTDAINKRHAEIYKGLFKAELFNGKVLKQLGTVTTTEHEN |
| | | ALLRSFDKFTTYFSGFYENRKNVFSAEDISTAIPHRIVQDNFPKFKENCHIFT |
| | | RLITAVPSLREHFENVKKAIGIFVSTSIEEVFSFPFYNQLLTQTQIDLYNQLLG |
| | | GISREAGTEKIKGLNEVLNLAIQKNDETAHIIASLPHRFIPLFKQILSDRNTLSF |
| | | ILEEFKSDEEVIQSFCKYKTLLRNENVLETAEALFNELNSIDLTHIFISHKKLE |
| | | TISSALCDHWDTLRNALYERRISELTGKITKSAKEKVQRSLKHEDINLQEIIS |
| | | AAGKELSEAFKQKTSEILSHAHAALDQPLPTTLKKQEEKEILKSQLDSLLGL |
| | | YHLLDWFAVDESNEVDPEFSARLTGIKLEMEPSLSFYNKARNYATKKPYSV |
| | | EKFKLNFQMPTLARGWDVNKEKNNGAILFVKNGLYYLGIMPKQKGRYKA |
| | | LSFEPTEKTSEGFDKMYYDYFPDAAKMIPRCSTQLKAVTAHFQTHTTPILLS |
| | | NNFIEPLEITKEIYDLNNPEKEPKKFQTAYAKKTGDQKGYREALCKWIDFTR |
| | | DFLSKYTKTTSIDLSSLRPSSQYKDLGEYYAELNPLLYHISFQRIAEKEIMDA |
| | | VETGKLYLFQIYNKDFAKGHHGKPNLHTLYWTGLFSPENLAKTSIKLNGQA |
| | | ELFYRPKSRMKRMAHRLGEKMLNKKLKDQKTPIPDTLYQELYDYVNHRLS |
| | | HDLSDEARALLPNVITKEVSHEIIKDRRFTSDKFFFHVPITLNYQAANSPSKF |
| | | NQRVNAYLKEHPETPIIGIARGERNLIYITVIDSTGKILEQRSLNTIQQFDYQK |
| | | KLDNREKERVAARQAWSVVGTIKDLKQGYLSQVIHEIVDLMIHYQAVVVL |
| | | ENLNFGFKSKRTGIAEKAVYQQFEKMLIDKLNCLVLKDYPAEKVGGVLNP |
| | | YQLTDQFTSFAKMGTQSGFLFYVPAPYTSKIDPLTGFVDPFVWKTIKNHESR |
| | | KHFLEGFDFLHYDVKTGDFILHFKMNRNLSFQRGLPGFMPAWDIVFEKNET |
| | | QFDAKGTPFIAGKRIVPVIENHRFTGRYRDLYPANELIALLEEKGIVFRDGSN |
| | | ILPKLLENDDSHAIDTMVALIRSVLQMRNSNAATGEDYINSPVRDLNGVCF |
| | | DSRFQNPEWPMDADANGAYHIALKGQLLLNHLKESKDLKLQNGISNQDWL |
| | | AYIQELRN |
| 23 | CasX | MEKRINKIRKKLSADNATKPVSRSGPMKTLLVRVMTDDLKKRLEKRRKKP |
| | | EVMPQVISNNAANNLRMLLDDYTKMKEAILQVYWQEFKDDHVGLMCKFA |
| | | QPASKKIDQNKLKPEMDEKGNLTTAGFACSQCGQPLFVYKLEQVSEKGKA |
| | | YTNYFGRCNVAEHEKLILLAQLKPEKDSDEAVTYSLGKFGQRALDFYSIHV |
| | | TKESTHPVKPLAQIAGNRYASGPVGKALSDACMGTIASFLSKYQDIIIEHQK |
| | | VVKGNQKRLESLRELAGKENLEYPSVTLPPQPHTKEGVDAYNEVIARVRM |
| | | WVNLNLWQKLKLSRDDAKPLLRLKGFPSFPVVERRENEVDWWNTINEVK |
| | | KLIDAKRDMGRVFWSGVTAEKRNTILEGYNYLPNENDHKKREGSLENPKK |
| | | PAKRQFGDLLLYLEKKYAGDWGKVFDEAWERIDKKIAGLTSHIEREEARN |
| | | AEDAQSKAVLTDWLRAKASFVLERLKEMDEKEFYACEIQLQKWYGDLRG |
| | | NPFAVEAENRVVDISGFSIGSDGHSIQYRNLLAWKYLENGKREFYLLMNYG |
| | | KKGRIRFTDGTDIKKSGKWQGLLYGGGKAKVIDLTFDPDDEQLIILPLAFGT |
| | | RQGREFIWNDLLSLETGLIKLANGRVIEKTIYNKKIGRDEPALFVALTFERRE |
| | | VVDPSNIKPVNLIGVDRGENIPAVIALTDPEGCPLPEFKDSSGGPTDILRIGEG |
| | | YKEKQRAIQAAKEVEQRRAGGYSRKFASKSRNLADDMVRNSARDLFYHA |
| | | VTHDAVLVFENLSRGFGRQGKRTFMTERQYTKMEDWLTAKLAYEGLTSK |
| | | TYLSKTLAQYTSKTCSNCGFTITTADYDGMLVRLKKTSDGWATTLNNKEL |
| | | KAEGQITYYNRYKRQTVEKELSAELDRLSEESGNNDISKWTKGRRDEALFL |
| | | LKKRFSHRPVQEQFVCLDCGHEVHADEQAALNIARSWLFLNSNSTEFKSYK |
| | | SGKQPFVGAWQAFYKRRLKEVWKPNA |
| 24 | dCasX | MEKRINKIRKKLSADNATKPVSRSGPMKTLLVRVMTDDLKKRLEKRRKKP |
| | | EVMPQVISNNAANNLRMLLDDYTKMKEAILQVYWQEFKDDHVGLMCKFA |
| | | QPASKKIDQNKLKPEMDEKGNLTTAGFACSQCGQPLFVYKLEQVSEKGKA |
| | | YTNYFGRCNVAEHEKLILLAQLKPEKDSDEAVTYSLGKFGQRALDFYSIHV |
| | | TKESTHPVKPLAQIAGNRYASGPVGKALSDACMGTIASFLSKYQDIIIEHQK |
| | | VVKGNQKRLESLRELAGKENLEYPSVTLPPQPHTKEGVDAYNEVIARVRM |
| | | WVNLNLWQKLKLSRDDAKPLLRLKGFPSFPVVERRENEVDWWNTINEVK |
| | | KLIDAKRDMGRVFWSGVTAEKRNTILEGYNYLPNENDHKKREGSLENPKK |
| | | PAKRQFGDLLLYLEKKYAGDWGKVFDEAWERIDKKIAGLTSHIEREEARN |
| | | AEDAQSKAVLTDWLRAKASFVLERLKEMDEKEFYACEIQLQKWYGDLRG |
| | | NPFAVEAENRVVDISGFSIGSDGHSIQYRNLLAWKYLENGKREFYLLMNYG |
| | | KKGRIRFTDGTDIKKSGKWQGLLYGGGKAKVIDLTFDPDDEQLIILPLAFGT |
| | | RQGREFIWNDLLSLETGLIKLANGRVIEKTIYNKKIGRDEPALFVALTFERRE |
| | | VVDPSNIKPVNLIGVARGENIPAVIALTDPEGCPLPEFKDSSGGPTDILRIGEG |
| | | YKEKQRAIQAAKEVEQRRAGGYSRKFASKSRNLADDMVRNSARDLFYHA |
| | | VTHDAVLVFANLSRGFGRQGKRTFMTERQYTKMEDWLTAKLAYEGLTSK |
| | | TYLSKTLAQYTSKTCSNCGFTITTADYDGMLVRLKKTSDGWATTLNNKEL |
| | | KAEGQITYYNRYKRQTVEKELSAELDRLSEESGNNDISKWTKGRRDEALFL |
| | | LKKRFSHRPVQEQFVCLDCGHEVHAAEQAALNIARSWLFLNSNSTEFKSYK |
| | | SGKQPFVGAWQAFYKRRLKEVWKPNA |
| 25 | CasY | MRKKLFKGYILHNKRLVYTGKAAIRSIKYPLVAPNKTALNNLSEKIIYDYEH |
| | | LFGPLNVASYARNSNRYSLVDFWIDSLRAGVIWQSKSTSLIDLISKLEGSKSP |
| | | SEKIFEQIDFELKNKLDKEQFKDIILLNTGIRSSSNVRSLRGRFLKCFKEEFRD |
| | | TEEVIACVDKWSKDLIVEGKSILVSKQFLYWEEEFGIKIFPHFKDNHDLPKLT |
| | | FFVEPSLEFSPHLPLANCLERLKKFDISRESLLGLDNNFSAFSNYFNELFNLLS |
| | | RGEIKKIVTAVLAVSKSWENEPELEKRLHFLSEKAKLLGYPKLTSSWADYR |
| | | MIIGGKIKSWHSNYTEQLIKVREDLKKHQIALDKLQEDLKKVVDSSLREQIE |
| | | AQREALLPLLDTMLKEKDFSDDLELYRFILSDFKSLLNGSYQRYIQTEEERK |
| | | EDRDVTKKYKDLYSNLRNIPRFFGESKKEQFNKFINKSLPTIDVGLKILEDIR |
| | | NALETVSVRKPPSITEEYVTKQLEKLSRKYKINAFNSNRFKQITEQVLRKYN |
| | | NGELPKISEVFYRYPRESHVAIRILPVKISNPRKDISYLLDKYQISPDWKNSNP |
| | | GEVVDLIEIYKLTLGWLLSCNKDFSMDFSSYDLKLFPEAASLIKNFGSCLSG |
| | | YYLSKMIFNCITSEIKGMITLYTRDKFVVRYVTQMIGSNQKFPLLCLVGEKQ |
| | | TKNFSRNWGVLIEEKGDLGEEKNQEKCLIFKDKTDFAKAKEVEIFKNNIWRI |
| | | RTSKYQIQFLNRLFKKTKEWDLMNLVLSEPSLVLEEEWGVSWDKDKLLPL |
| | | LKKEKSCEERLYYSLPLNLVPATDYKEQSAEIEQRNTYLGLDVGEFGVAYA |
| | | VVRIVRDRIELLSWGFLKDPALRKIRERVQDMKKKQVMAVFSSSSTAVARV |
| | | REMAIHSLRNQIHSIALAYKAKIIYEISISNFETGGNRMAKIYRSIKVSDVYRE |
| | | SGADTLVSEMIWGKKNKQMGNHISSYATSYTCCNCARTPFELVIDNDKEYE |
| | | KGGDEFIFNVGDEKKVRGFLQKSLLGKTIKGKEVLKSIKEYARPPIREVLLE |
| | | GEDVEQLLKRRGNSYIYRCPFCGYKTDADIQAALNIACRGYISDNAKDAVK |
| | | EGERKLDYILEVRKLWEKNGAVLRSAKFL |
| 26 | CasPhi | MADTPTLFTQFLRHHLPGQRFRKDILKQAGRILANKGEDATIAFLRGKSEES |
| | | PPDFQPPVKCPIIACSRPLTEWPIYQASVAIQGYVYGQSLAEFEASDPGCSKD |
| | | GLLGWFDKTGVCTDYFSVQGLNLIFQNARKRYIGVQTKVTNRNEKRHKKL |
| | | KRINAKRIAEGLPELTSDEPESALDETGHLIDPPGLNTNIYCYQQVSPKPLAL |
| | | SEVNQLPTAYAGYSTSGDDPIQPMVTKDRLSISKGQPGYIPEHQRALLSQKK |
| | | HRRMRGYGLKARALLVIVRIQDDWAVIDLRSLLRNAYWRRIVQTKEPSTIT |
| | | KLLKLVTGDPVLDATRMVATFTYKPGIVQVRSAKCLKNKQGSKLFSERYL |
| | | NETVSVTSIDLGSNNLVAVATYRLVNGNTPELLQRFTLPSHLVKDFERYKQ |
| | | AHDTLEDSIQKTAVASLPQGQQTEIRMWSMYGFREAQERVCQELGLADGSI |
| | | PWNVMTATSTILTDLFLARGGDPKKCMFTSEPKKKKNSKQVLYKIRDRAW |
| | | AKMYRTLLSKETREAWNKALWGLKRGSPDYARLSKRKEELARRCVNYTIS |
| | | TAEKRAQCGRTIVALEDLNIGFFHGRGKQEPGWVGLFTRKKENRWLMQAL |
| | | HKAFLELAHHRGYHVIEVNPAYTSQTCPVCRHCDPDNRDQHNREAFHCIGC |
| | | GFRGNADLDVATHNIAMVAITGESLKRARGSVASKTPQPLAAE |
| 27 | dCasPhi | MPKPAVESEFSKVLKKHFPGERFRSSYMKRGGKILAAQGEEAVVAYLQGK |
| | | SEEEPPNFQPPAKCHVVTKSRDFAEWPIMKASEAIQRYIYALSTTERAACKP |
| | | GKSSESHAAWFAATGVSNHGYSHVQGLNLIFDHTLGRYDGVLKKVQLRNE |
| | | KARARLESINASRADEGLPEIKAEEEEVATNETGHLLQPPGINPSFYVYQTIS |
| | | PQAYRPRDEIVLPPEYAGYVRDPNAPIPLGVVRNRCDIQKGCPGYIPEWQRE |
| | | AGTAISPKTGKAVTVPGLSPKKNKRMRRYWRSEKEKAQDALLVTVRIGTD |
| | | WVVIDVRGLLRNARWRTIAPKDISLNALLDLFTGDPVIDVRRNIVTFTYTLD |
| | | ACGTYARKWTLKGKQTKATLDKLTATQTVALVAIALGQTNPISAGISRVTQ |
| | | ENGALQCEPLDRFTLPDDLLKDISAYRIAWDRNEEELRARSVEALPEAQQA |
| | | EVRALDGVSKETARTQLCADFGLDPKRLPWDKMSSNTTFISEALLSNSVSR |
| | | DQVFFTPAPKKGAKKKAPVEVMRKDRTWARAYKPRLSVEAQKLKNEALW |
| | | ALKRTSPEYLKLSRRKEELCRRSINYVIEKTRRRTQCQIVIPVIEDLNVRFFH |
| | | GSGKRLPGWDNFFTAKKENRWFIQGLHKAFSDLRTHRSFYVFEVRPERTSIT |
| | | CPKCGHCEVGNRDGEAFQCLSCGKTCNADLDVATHNLTQVALTGKTMPK |
| | | REEPRDAQGTAPARKTKKASKSKAPPAEREDQTPAQEPSQTS |
| 28 | Cas12f1 | MIKVYRYEIVKPLDLDWKEFGTILRQLQQETRFALNKATQLAWEWMGFSS |
| | (Cas14a) | DYKDNHGEYPKSKDILGYTNVHGYAYHTIKTKAYRLNSGNLSQTIKRATD |
| | | RFKAYQKEILRGDMSIPSYKRDIPLDLIKENISVNRMNHGDYIASLSLLSNPA |
| | | KQEMNVKRKISVIIIVRGAGKTIMDRILSGEYQVSASQIIHDDRKNKWYLNIS |
| | | YDFEPQTRVLDLNKIMGIDLGVAVAVYMAFQHTPARYKLEGGEIENFRRQ |
| | | VESRRISMLRQGKYAGGARGGHGRDKRIKPIEQLRDKIANFRDTTNHRYSR |
| | | YIVDMAIKEGCGTIQMEDLTNIRDIGSRFLQNWTYYDLQQKIIYKAEEAGIK |
| | | VIKIDPQYTSQRCSECGNIDSGNRIGQAIFKCRACGYEANADYNAARNIAIPN |
| | | IDKIIAESIKSGGS |
| 29 | Cas12f2 | NAMIAQKTIKIKLNPTKEQIIKLNSIIEEYIKVSNFTAKKIAEIQESFTDSGLTQ |
| | (Cas14b) | GTCSECGKEKTYRKYHLLKKDNKLFCITCYKRKYSQFTLQKVEFQNKTGLR |
| | | NVAKLPKTYYTNAIRFASDTFSGFDEIIKKKQNRLNSIQNRLNFWKELLYNP |
| | | SNRNEIKIKVVKYAPKTDTREHPHYYSEAEIKGRIKRLEKQLKKFKMPKYPE |
| | | FTSETISLQRELYSWKNPDELKISSITDKNESMNYYGKEYLKRYIDLINSQTP |
| | | QILLEKENNSFYLCFPITKNIEMPKIDDTFEPVGIDWGITRNIAVVSILDSKTK |
| | | KPKFVKFYSAGYILGKRKHYKSLRKHFGQKKRQDKINKLGTKEDRFIDSNI |
| | | HKLAFLIVKEIRNHSNKPIILMENITDNREEAEKSMRQNILLHSVKSRLQNYI |
| | | AYKALWNNIPTNLVKPEHTSQICNRCGHQDRENRPKGSKLFKCVKCNYMS |
| | | NADFNASINIARKFYIGEYEPFYKDNEKMKSGVNSISM |
| 30 | Cas12f3 | MEVQKTVMKTLSLRILRPLYSQEIEKEIKEEEKERRKQAGGTGELDGGFYK |
| | (Cas14c) | KLEKKHSEMFSFDRLNLLLNQLQREIAKVYNHAISELYIATIAQGNKSNKHY |
| | | ISSIVYNRAYGYFYNAYIALGICSKVEANFRSNELLTQQSALPTAKSDNFPIV |
| | | LHKQKGAEGEDGGFRISTEGSDLIFEIPIPFYEYNGENRKEPYKWVKKGGQK |
| | | PVLKLILSTFRRQRNKGWAKDEGTDAEIRKVTEGKYQVSQIEINRGKKLGE |
| | | HQKWFANFSIEQPIYERKPNRSIVGGLDVGIRSPLVCAINNSFSRYSVDSNDV |
| | | FKFSKQVFAFRRRLLSKNSLKRKHGHAAHKLEPITEMTEKNDKFRKKIIER |
| | | WAKEVTNFFVKNQVGIVQIEDLSTMKDREDHFFNQYLRGFWPYYQMQTLI |
| | | ENKLKEYGIEVKRVQAKYTSQLCSNPNCRYWNNYFNFEYRKVNKFPKFKC |
| | | EKCNLEISADYNAARNLSTPDIEKFVAKATKGINLPEK |
| 31 | C2c8 | MKVLEFKIHPTEEQVSKIDQSLAACKLLWNLSIALKEESKQRYYRKKHKFD |
| | | EFSPEIWGLSYSGHYDEKEFKTLKDKEKKLLIGNPCCKIAYFKKTSNGKEYT |
| | | PLNSIPIRRFMNAENIDKDAVNYLNRKKLAFYFRENTAKFIGEIETEFKKGFF |
| | | KSVIKPAYDAAKKGIRGIPRFKGRRDKVETLVNGQPETIKIKSNGVIVSSKIG |
| | | LLKIRGLDRLQGKAPRMAKITRKATGYYLQLTIETDDTIYKESDKCVGLDM |
| | | GAVAIFTDDLGRQSEAKRYAKIQKKRLNRLQRQASRQKDNSNNQRKTYAK |
| | | LARVHEKIARQRKGRNAQLAHKITSEYQSVILEDLNLKNMTAAAKPKERED |
| | | GDGYKQNGKKRKSGLNKALLDNAIGQLRTFIENKANERGRKIIRVNPKHTS |
| | | QTCPNCGNIDKANRVSQSKFKCVSCGYEAHADQNAAANILIRGLRDEFLRA |
| | | IGSLYKFPVSMIGKYPGLAGEFTPDLDANQESIGDAPIENAEHSISKQMKQE |
| | | GNRTPTQPENGSQSLIFLSAPPQPCGDSHGTNNPKALPNKASKRSSKKPRGA |
| | | IPENPDQLTIWDLLD |
| 32 | human | MPARTAPARVPTLAVPAISLPDDVRRRLKDLERDSLTEKECVKEKLNLLHE |
| | DNMT1 | FLQTEIKNQLCDLETKLRKEELSEEGYLAKVKSLLNKDLSLENGAHAYNRE |
| | | VNGRLENGNQARSEARRVGMADANSPPKPLSKPRTPRRSKSDGEAKPEPSP |
| | | SPRITRKSTRQTTITSHFAKGPAKRKPQEESERAKSDESIKEEDKDQDEKRRR |
| | | VTSRERVARPLPAEEPERAKSGTRTEKEEERDEKEEKRLRSQTKEPTPKQKL |
| | | KEEPDREARAGVQADEDEDGDEKDEKKHRSQPKDLAAKRRPEEKEPEKVN |
| | | PQISDEKDEDEKEEKRRKTTPKEPTEKKMARAKTVMNSKTHPPKCIQCGQY |
| | | LDDPLKYGQHPPDAVDEPQMLTNEKLSIFDANESGFESYEALPQHKLTCFS |
| | | VYCKHGHLCPIDTGLIEKNIELFFSGSAKPIYDDDPSLEGGVNGKNLGPINE |
| | | WWITGFDGGEKALIGFSTSFAEYILMDPSPEYAPIFGLMQEKIYISKIVVEFL |
| | | QSNSDSTYEDLINKIETTVPPSGLNLNRFTEDSLLRHAQFVVEQVESYDEAG |
| | | DSDEQPIFLTPCMRDLIKLAGVTLGQRRAQARRQTIRHSTREKDRGPTKATT |
| | | TKLVYQIFDTFFAEQIEKDDREDKENAFKRRRCGVCEVCQQPECGKCKACK |
| | | DMVKFGGSGRSKQACQERRCPNMAMKEADDDEEVDDNIPEMPSPKKMHQ |
| | | GKKKKQNKNRISWVGEAVKTDGKKSYYKKVCIDAETLEVGDCVSVIPDDS |
| | | SKPLYLARVTALWEDSSNGQMFHAHWFCAGTDTVLGATSDPLELFLVDEC |
| | | EDMQLSYIHSKVKVIYKAPSENWAMEGGMDPESLLEGDDGKTYFYQLWY |
| | | DQDYARFESPPKTQPTEDNKFKFCVSCARLAEMRQKEIPRVLEQLEDLDSR |
| | | VLYYSATKNGILYRVGDGVYLPPEAFTFNIKLSSPVKRPRKEPVDEDLYPEH |
| | | YRKYSDYIKGSNLDAPEPYRIGRIKEIFCPKKSNGRPNETDIKIRVNKFYRPE |
| | | NTHKSTPASYHADINLLYWSDEEAVVDFKAVQGRCTVEYGEDLPECVQVY |
| | | SMGGPNRFYFLEAYNAKSKSFEDPPNHARSPGNKGKGKGKGKGKPKSQAC |
| | | EPSEPEIEIKLPKLRTLDVFSGCGGLSEGFHQAGISDTLWAIEMWDPAAQAF |
| | | RLNNPGSTVFTEDCNILLKLVMAGETTNSRGQRLPQKGDVEMLCGGPPCQ |
| | | GFSGMNRFNSRTYSKFKNSLVVSFLSYCDYYRPRFFLLENVRNFVSFKRSM |
| | | VLKLTLRCLVRMGYQCTFGVLQAGQYGVAQTRRRAIILAAAPGEKLPLFPE |
| | | PLHVFAPRACQLSVVVDDKKFVSNITRLSSGPFRTITVRDTMSDLPEVRNGA |
| | | SALEISYNGEPQSWFQRQLRGAQYQPILRDHICKDMSALVAARMRHIPLAP |
| | | GSDWRDLPNIEVRLSDGTMARKLRYTHHDRKNGRSSSGALRGVCSCVEAG |
| | | KACDPAARQFNTLIPWCLPHTGNRHNHWAGLYGRLEWDGFFSTTVTNPEP |
| | | MGKQGRVLHPEQHRVVSVRECARSQGFPDTYRLFGNILDKHRQVGNAVPP |
| | | PLAKAIGLEIKLCMLAKARESASAKIKEEEAAKD |
| 33 | human | MPAMPSSGPGDTSSSAAEREEDRKDGEEQEEPRGKEERQEPSTTARKVGRP |
| | DNMT3A | GRKRKHPPVESGDTPKDPAVISKSPSMAQDSGASELLPNGDLEKRSEPQPEE |
| | | GSPAGGQKGGAPAEGEGAAETLPEASRAVENGCCTPKEGRGAPAEAGKEQ |
| | | KETNIESMKMEGSRGRLRGGLGWESSLRQRPMPRLTFQAGDPYYISKRKRD |
| | | EWLARWKREAEKKAKVIAGMNAVEENQGPGESQKVEEASPPAVQQPTDP |
| | | ASPTVATTPEPVGSDAGDKNATKAGDDEPEYEDGRGFGIGELVWGKLRGF |
| | | SWWPGRIVSWWMTGRSRAAEGTRWVMWFGDGKFSVVCVEKLMPLSSFC |
| | | SAFHQATYNKQPMYRKAIYEVLQVASSRAGKLFPVCHDSDESDTAKAVEV |
| | | QNKPMIEWALGGFQPSGPKGLEPPEEEKNPYKEVYTDMWVEPEAAAYAPP |
| | | PPAKKPRKSTAEKPKVKEIIDERTRERLVYEVRQKCRNIEDICISCGSLNVTL |
| | | EHPLFVGGMCQNCKNCFLECAYQYDDDGYQSYCTICCGGREVLMCGNNN |
| | | CCRCFCVECVDLLVGPGAAQAAIKEDPWNCYMCGHKGTYGLLRRREDWP |
| | | SRLQMFFANNHDQEFDPPKVYPPVPAEKRKPIRVLSLFDGIATGLLVLKDLG |
| | | IQVDRYIASEVCEDSITVGMVRHQGKIMYVGDVRSVTQKHIQEWGPFDLVI |
| | | GGSPCNDLSIVNPARKGLYEGTGRLFFEFYRLLHDARPKEGDDRPFFWLFE |
| | | NVVAMGVSDKRDISRFLESNPVMIDAKEVSAAHRARYFWGNLPGMNRPLA |
| | | STVNDKLELQECLEHGRIAKFSKVRTITTRSNSIKQGKDQHFPVFMNEKEDI |
| | | LWCTEMERVFGFPVHYTDVSNMSRLARQRLLGRSWSVPVIRHLFAPLKEYF |
| | | ACV |
| 34 | human | NHDQEFDPPKVYPPVPAEKRKPIRVLSLFDGIATGLLVLKDLGIQVDRYIASE |
| | DNMT3A | VCEDSITVGMVRHQGKIMYVGDVRSVTQKHIQEWGPFDLVIGGSPCNDLSI |
| | catalytic | VNPARKGLYEGTGRLFFEFYRLLHDARPKEGDDRPFFWLFENVVAMGVSD |
| | domain | KRDISRFLESNPVMIDAKEVSAAHRARYFWGNLPGMNRPLASTVNDKLEL |
| | | QECLEHGRIAKFSKVRTITTRSNSIKQGKDQHFPVFMNEKEDILWCTEMERV |
| | | FGFPVHYTDVSNMSRLARQRLLGRSWSVPVIRHLFAPLKEYFACV |
| 35 | human | MKGDTRHLNGEEDAGGREDSILVNGACSDQSSDSPPILEAIRTPEIRGRRSSS |
| | DNMT3B | RLSKREVSSLLSYTQDLTGDGDGEDGDGSDTPVMPKLFRETRTRSESPAVR |
| | | TRNNNSVSSRERHRPSPRSTRGRQGRNHVDESPVEFPATRSLRRRATASAGT |
| | | PWPSPPSSYLTIDLTDDTEDTHGTPQSSSTPYARLAQDSQQGGMESPQVEAD |
| | | SGDGDSSEYQDGKEFGIGDLVWGKIKGFSWWPAMVVSWKATSKRQAMSG |
| | | MRWVQWFGDGKFSEVSADKLVALGLFSQHFNLATFNKLVSYRKAMYHAL |
| | | EKARVRAGKTFPSSPGDSLEDQLKPMLEWAHGGFKPTGIEGLKPNNTQPVV |
| | | NKSKVRRAGSRKLESRKYENKTRRRTADDSATSDYCPAPKRLKTNCYNNG |
| | | KDRGDEDQSREQMASDVANNKSSLEDGCLSCGRKNPVSFHPLFEGGLCQT |
| | | CRDRFLELFYMYDDDGYQSYCTVCCEGRELLLCSNTSCCRCFCVECLEVLV |
| | | GTGTAAEAKLQEPWSCYMCLPQRCHGVLRRRKDWNVRLQAFFTSDTGLE |
| | | YEAPKLYPAIPAARRRPIRVLSLFDGIATGYLVLKELGIKVGKYVASEVCEES |
| | | IAVGTVKHEGNIKYVNDVRNITKKNIEEWGPFDLVIGGSPCNDLSNVNPAR |
| | | KGLYEGTGRLFFEFYHLLNYSRPKEGDDRPFFWMFENVVAMKVGDKRDIS |
| | | RFLECNPVMIDAIKVSAAHRARYFWGNLPGMNRPVIASKNDKLELQDCLE |
| | | YNRIAKLKKVQTITTKSNSIKQGKNQLFPVVMNGKEDVLWCTELERIFGFP |
| | | VHYTDVSNMGRGARQKLLGRSWSVPVIRHLFAPLKDYFACE |
| 36 | mouse | MRGGSRHLSNEEDVSGCEDCIIISGTCSDQSSDPKTVPLTQVLEAVCTVENR |
| | DNMT3C | GCRTSSQPSKRKASSLISYVQDLTGDGDEDRDGEVGGSSGSGTPVMPQLFC |
| | | ETRIPSKTPAPLSWQANTSASTPWLSPASPYPIIDLTDEDVIPQSISTPSVDWS |
| | | QDSHQEGMDTTQVDAESRDGGNIEYQVSADKLLLSQSCILAAFYKLVPYRE |
| | | SIYRTLEKARVRAGKACPSSPGESLEDQLKPMLEWAHGGFKPTGIEGLKPN |
| | | KKQPENKSRRRTTNDPAASESSPPKRLKTNSYGGKDRGEDEESREQMASDV |
| | | TNNKGNLEDHCLSCGRKDPVSFHPLFEGGLCQSCRDRFLELFYMYDEDGY |
| | | QSYCTVCCEGRELLLCSNTSCCRCFCVECLEVLVGAGTAEDVKLQEPWSCY |
| | | MCLPQRCHGVLRRRKDWNMRLQDFFTTDPDLEEFEPPKLYPAIPAAKRRPI |
| | | RVLSLFDGIATGYLVLKELGIKVEKYIASEVCAESIAVGTVKHEGQIKYVDD |
| | | IRNITKEHIDEWGPFDLVIGGSPCNDLSCVNPVRKGLFEGTGRLFFEFYRLLN |
| | | YSCPEEEDDRPFFWMFENVVAMEVGDKRDISRFLECNPVMIDAIKVSAAHR |
| | | ARYFWGNLPGMNRPVMASKNDKLELQDCLEFSRTAKLKKVQTITTKSNSIR |
| | | QGKNQLFPVVMNGKDDVLWCTELERIFGFPEHYTDVSNMGRGARQKLLG |
| | | RSWSVPVIRHLFAPLKDHFACE |
| 37 | human | MAAIPALDPEAEPSMDVILVGSSELSSSVSPGTGRDLIAYEVKANQRNIEDIC |
| | DNMT3L | ICCGSLQVHTQHPLFEGGICAPCKDKFLDALFLYDDDGYQSYCSICCSGETL |
| | | LICGNPDCTRCYCFECVDSLVGPGTSGKVHAMSNWVCYLCLPSSRSGLLQR |
| | | RRKWRSQLKAFYDRESENPLEMFETVPVWRRQPVRVLSLFEDIKKELTSLG |
| | | FLESGSDPGQLKHVVDVTDTVRKDVEEWGPFDLVYGATPPLGHTCDRPPS |
| | | WYLFQFHRLLQYARPKPGSPRPFFWMFVDNLVLNKEDLDVASRFLEMEPV |
| | | TIPDVHGGSLQNAVRVWSNIPAIRSSRHWALVSEEELSLLAQNKQSSKLAA |
| | | KWPTKLVKNCFLPLREYFKYFSTELTSSL |
| 38 | human | NPLEMFETVPVWRRQPVRVLSLFEDIKKELTSLGFLESGSDPGQLKHVVDV |
| | DNMT3L | TDTVRKDVEEWGPFDLVYGATPPLGHTCDRPPSWYLFQFHRLLQYARPKP |
| | catalytic | GSPRPFFWMFVDNLVLNKEDLDVASRFLEMEPVTIPDVHGGSLQNAVRVW |
| | domain | SNIPAIRSRHWALVSEEELSLLAQNKQSSKLAAKWPTKLVKNCFLPLREYFK |
| | | YFSTELTSSL |
| 39 | mouse | MGSRETPSSCSKTLETLDLETSDSSSPDADSPLEEQWLKSSPALKEDSVDVV |
| | DNMT3L | LEDCKEPLSPSSPPTGREMIRYEVKVNRRSIEDICLCCGTLQVYTRHPLFEGG |
| | | LCAPCKDKFLESLFLYDDDGHQSYCTICCSGGTLFICESPDCTRCYCFECVDI |
| | | LVGPGTSERINAMACWVCFLCLPFSRSGLLQRRKRWRHQLKAFHDQEGAG |
| | | PMEIYKTVSAWKRQPVRVLSLFRNIDKVLKSLGFLESGSGSGGGTLKYVED |
| | | VTNVVRRDVEKWGPFDLVYGSTQPLGSSCDRCPGWYMFQFHRILQYALPR |
| | | QESQRPFFWIFMDNLLLTEDDQETTTRFLQTEAVTLQDVRGRDYQNAMRV |
| | | WSNIPGLKSKHAPLTPKEEEYLQAQVRSRSKLDAPKVDLLVKNCLLPLREY |
| | | FKYFSQNSLPL |
| 40 | mouse | GPMEIYKTVSAWKRQPVRVLSLFRNIDKVLKSLGFLESGSGSGGGTLKYVE |
| | DNMT3L | DVTNVVRRDVEKWGPFDLVYGSTQPLGSSCDRCPGWYMFQFHRILQYALP |
| | catalytic | RQESQRPFFWIFMDNLLLTEDDQETTTRFLQTEAVTLQDVRGRDYQNAMR |
| | domain | VWSNIPGLKSKHAPLTPKEEEYLQAQVRSRSKLDAPKVDLLVKNCLLPLRE |
| | | YFKYFSQNSLPL |
| 41 | human | MEPLRVLELYSGVGGMHHALRESCIPAQVVAAIDVNTVANEVYKYNFPHT |
| | TRDMT1 | QLLAKTIEGITLEEFDRLSFDMILMSPPCQPFTRIGRQGDMTDSRTNSFLHILD |
| | (DNMT2) | ILPRLQKLPKYILLENVKGFEVSSTRDLLIQTIENCGFQYQEFLLSPTSLGIPNS |
| | | RLRYFLIAKLQSEPLPFQAPGQVLMEFPKIESVHPQKYAMDVENKIQEKNVE |
| | | PNISFDGSIQCSGKDAILFKLETAEEIHRKNQQDSDLSVKMLKDFLEDDTDV |
| | | NQYLLPPKSLLRYALLLDIVQPTCRRSVCFTKGYGSYIEGTGSVLQTAEDVQ |
| | | VENIYKSLTNLSQEEQITKLLILKLRYFTPKEIANLLGFPPEFGFPEKITVKQR |
| | | YRLLGNSLNVHVVAKLIKILYE |
| 42 | M. | MNSNKDKIKVIKVFEAFAGIGSQFKALKNIARSKNWEIQHSGMVEWFVDAI |
| | penetrans | VSYVAIHSKNFNPKIEQLDKDILSISNDSKMPISEYGIKKINNTIKASYLNYAK |
| | M MpeI | KHFNNLFDIKKVNKDNFPKNIDIFTYSFPCQDLSVQGLQKGIDKELNTRSGL |
| | | LWEIERILEEIKNSFSKEEMPKYLLMENVKNLLSHKNKKNYNTWLKQLEKF |
| | | GYKSKTYLLNSKNFDNCQNRERVFCLSIRDDYLEKTGFKFKELEKVKNPPK |
| | | KIKDILVDSSNYKYLNLNKYETTTFRETKSNIISRSLKNYTTFNSENYVYNIN |
| | | GIGPTLTASGANSRIKIETQQGVRYLTPLECFKYMQFDVNDFKKVQSTNLIS |
| | | ENKMIYIAGNSIPVKILEAIFNTLEFVNNEE |
| 43 | S. | MSKVENKTKKLRVFEAFAGIGAQRKALEKVRKDEYEIVGLAEWYVPAIVM |
| | monobiae | YQAIHNNFHTKLEYKSVSREEMIDYLENKTLSWNSKNPVSNGYWKRKKDD |
| | M SssI | ELKIIYNAIKLSEKEGNIFDIRDLYKRTLKNIDLLTYSFPCQDLSQQGIQKGM |
| | | KRGSGTRSGLLWEIERALDSTEKNDLPKYLLMENVGALLHKKNEEELNQW |
| | | KQKLESLGYQNSIEVLNAADFGSSQARRRVFMISTLNEFVELPKGDKKPKSI |
| | | KKVLNKIVSEKDILNNLLKYNLTEFKKTKSNINKASLIGYSKFNSEGYVYDP |
| | | EFTGPTLTASGANSRIKIKDGSNIRKMNSDETFLYIGFDSQDGKRVNEIEFLT |
| | | ENQKIFVCGNSISVEVLEAIIDKIGG |
| 44 | H. | MKDVLDDNLLEEPAAQYSLFEPESNPNLREKFTFIDLFAGIGGFRIAMQNLG |
| | parainfluenzae | GKCIFSSEWDEQAQKTYEANFGDLPYGDITLEETKAFIPEKFDILCAGFPCQA |
| | M HpaII | FSIAGKRGGFEDTRGTLFFDVAEIIRRHQPKAFFLENVKGLKNHDKGRTLKT |
| | | ILNVLREDLGYFVPEPAIVNAKNFGVPQNRERIYIVGFHKSTGVNSFSYPEPL |
| | | DKIVTFADIREEKTVPTKYYLSTQYIDTLRKHKERHESKGNGFGYEIIPDDGI |
| | | ANAIVVGGMGRERNLVIDHRITDFTPTTNIKGEVNREGIRKMTPREWARLQ |
| | | GFPDSYVIPVSDASAYKQFGNSVAVPAIQATGKKILEKLGNLYD |
| 45 | A. luteus | MSKANAKYSFVDLFAGIGGFHAALAATGGVCEYAVEIDREAAAVYERNW |
| | M AluI | NKPALGDITDDANDEGVTLRGYDGPIDVLTGGFPCQPFSKSGAQHGMAETR |
| | | GTLFWNIARIIEEREPTVLILENVRNLVGPRHRHEWLTIIETLRFFGYEVSGAP |
| | | AIFSPHLLPAWMGGTPQVRERVFITATLVPERMRDERIPRTETGEIDAEAIGP |
| | | KPVATMNDRFPIKKGGTELFHPGDRKSGWNLLTSGIIREGDPEPSNVDLRLT |
| | | ETETLWIDAWDDLESTIRRATGRPLEGFPYWADSWTDFRELSRLVVIRGFQ |
| | | APEREVVGDRKRYVARTDMPEGFVPASVTRPAIDETLPAWKQSHLRRNYD |
| | | FFERHFAEVVAWAYRWGVYTDLFPASRRKLEWQAQDAPRLWDTVMHFRP |
| | | SGIRAKRPTYLPALVAITQTSIVGPLERRLSPRETARLQGLPEWFDFGEQRAA |
| | | ATYKQMGNGVNVGVVRHILREHVRRDRALLKLTPAGQRIINAVLADEPDA |
| | | TVGALGAAE |
| 46 | H. | MNLISLFSGAGGLDLGFQKAGFRIICANEYDKSIWKTYESNHSAKLIKGDIS |
| | aegyptius | KISSDEFPKCDGIIGGPPCQSWSEGGSLRGIDDPRGKLFYEYIRILKQKKPIFF |
| | M HaeIII | LAENVKGMMAQRHNKAVQEFIQEFDNAGYDVHIILLNANDYGVAQDRKR |
| | | VFYIGFRKELNINYLPPIPHLIKPTFKDVIWDLKDNPIPALDKNKTNGNKCIY |
| | | PNHEYFIGSYSTIFMSRNRVRQWNEPAFTVQASGRQCQLHPQAPVMLKVSK |
| | | NLNKFVEGKEHLYRRLTVRECARVQGFPDDFIFHYESLNDGYKMIGNAVPV |
| | | NLAYEIAKTIKSALEICKGN |
| 47 | H. | MIEIKDKQLTGLRFIDLFAGLGGFRLALESCGAECVYSNEWDKYAQEVYEM |
| | haemolyticus | NFGEKPEGDITQVNEKTIPDHDILCAGFPCQAFSISGKQKGFEDSRGTLFFDI |
| | M HhaI | ARIVREKKPKVVFMENVKNFASHDNGNTLEVVKNTMNELDYSFHAKVLN |
| | | ALDYGIPQKRERIYMICFRNDLNIQNFQFPKPFELNTFVKDLLLPDSEVEHLV |
| | | IDRKDLVMTNQEIEQTTPKTVRLGIVGKGGQGERIYSTRGIAITLSAYGGGIF |
| | | AKTGGYLVNGKTRKLHPRECARVMGYPDSYKVHPSTSQAYKQFGNSVVIN |
| | | VLQYIAYNIGSSLNFKPY |
| 48 | Moraxella | MKPEILKLIRSKLDLTQKQASEIIEVSDKTWQQWESGKTEMHPAYYSFLQE |
| | M MspI | KLKDKINFEELSAQKTLQKKIFDKYNQNQITKNAEELAEITHIEERKDAYSS |
| | | DFKFIDLFSGIGGIRQSFEVNGGKCVFSSEIDPFAKFTYYTNFGVVPFGDITKV |
| | | EATTIPQHDILCAGFPCQPFSHIGKREGFEHPTQGTMFHEIVRIIETKKTPVLF |
| | | LENVPGLINHDDGNTLKVIIETLEDMGYKVHHTVLDASHFGIPQKRKRFYL |
| | | VAFLNQNIHFEFPKPPMISKDIGEVLESDVTGYSISEHLQKSYLFKKDDGKPS |
| | | LIDKNTTGAVKTLVSTYHKIQRLTGTFVKDGETGIRLLTTNECKAIMGFPKD |
| | | FVIPVSRTQMYRQMGNSVVVPVVTKIAEQISLALKTVNQQSPQENFELELV |
| 49 | Ascobolus | MSERRYEAGMTVALHEGSFLKIQRVYIRQYHADNRREHMLVGPLFRRTKY |
| | Masc1 | LKALSKKVNEVAIVHESIHVPVQDVIGVRELIITNRPFPECRKGDEHTGRLVC |
| | | RWVYNLDERAKGREYKKQRYIRRITEAEADPEYRVEDRVLRRRWFQEGYI |
| | | GDEISYKEHGNGDIVDIRSESPLQVLDGWGGDLVDLENGEETSIPGPCRSAS |
| | | SYGRLMKPPLAQAADSNTSRKYTFGDTFCGGGGVSLGARQAGLEVKWAF |
| | | DMNPNAGANYRRNFPNTDFFLAEAEQFIQLSVGISQHVDILHLSPPCQTFSR |
| | | AHTIAGKNDENNEASFFAVVNLIKAVRPRLFTVEETDGIMDRQSRQFIDTAL |
| | | MGITELGYSFRICVLNAIEYGVCQNRKRLIIIGAAPGEELPPFPLPTHQDFFSK |
| | | DPRRDLLPAVTLDDALSTITPESTDHHLNHVWQPAEWKTPYDAHRPFKNAI |
| | | RAGGGEYDIYPDGRRKFTVRELACIQGFPDEYEFVGTLTDKRRIIGNAVPPP |
| | | LSAAIMSTLRQWMTEKDFERME |
| 50 | Arabidopsis | MVENGAKAAKRKKRPLPEIQEVEDVPRTRRPRRAAACTSFKEKSIRVCEKS |
| | MET1 | ATIEVKKQQIVEEEFLALRLTALETDVEDRPTRRLNDFVLFDSDGVPQPLEM |
| | | LEIHDIFVSGAILPSDVCTDKEKEKGVRCTSFGRVEHWSISGYEDGSPVIWIS |
| | | TELADYDCRKPAASYRKVYDYFYEKARASVAVYKKLSKSSGGDPDIGLEE |
| | | LLAAVVRSMSSGSKYFSSGAAIIDFVISQGDFIYNQLAGLDETAKKHESSYV |
| | | EIPVLVALREKSSKIDKPLQRERNPSNGVRIKEVSQVAESEALTSDQLVDGT |
| | | DDDRRYAILLQDEENRKSMQQPRKNSSSGSASNMFYIKINEDEIANDYPLPS |
| | | YYKTSEEETDELILYDASYEVQSEHLPHRMLHNWALYNSDLRFISLELLPM |
| | | KQCDDIDVNIFGSGVVTDDNGSWISLNDPDSGSQSHDPDGMCIFLSQIKEW |
| | | MIEFGSDDIISISIRTDVAWYRLGKPSKLYAPWWKPVLKTARVGISILTFLRV |
| | | ESRVARLSFADVTKRLSGLQANDKAYISSDPLAVERYLVVHGQIILQLFAVY |
| | | PDDNVKRCPFVVGLASKLEDRHHTKWIIKKKKISLKELNLNPRAGMAPVAS |
| | | KRKAMQATTTRLVNRIWGEFYSNYSPEDPLQATAAENGEDEVEEEGGNGE |
| | | EEVEEEGENGLTEDTVPEPVEVQKPHTPKKIRGSSGKREIKWDGESLGKTSA |
| | | GEPLYQQALVGGEMVAVGGAVTLEVDDPDEMPAIYFVEYMFESTDHCKM |
| | | LHGRFLQRGSMTVLGNAANERELFLTNECMTTQLKDIKGVASFEIRSRPWG |
| | | HQYRKKNITADKLDWARALERKVKDLPTEYYCKSLYSPERGGFFSLPLSDI |
| | | GRSSGFCTSCKIREDEEKRSTIKLNVSKTGFFINGIEYSVEDFVYVNPDSIGGL |
| | | KEGSKTSFKSGRNIGLRAYVVCQLLEIVPKESRKADLGSFDVKVRRFYRPED |
| | | VSAEKAYASDIQELYFSQDTVVLPPGALEGKCEVRKKSDMPLSREYPISDHI |
| | | FFCDLFFDTSKGSLKQLPANMKPKFSTIKDDTLLRKKKGKGVESEIESEIVKP |
| | | VEPPKEIRLATLDIFAGCGGLSHGLKKAGVSDAKWAIEYEEPAGQAFKQNH |
| | | PESTVFVDNCNVILRAIMEKGGDQDDCVSTTEANELAAKLTEEQKSTLPLP |
| | | GQVDFINGGPPCQGFSGMNRFNQSSWSKVQCEMILAFLSFADYFRPRYFLL |
| | | ENVRTFVSFNKGQTFQLTLASLLEMGYQVRFGILEAGAYGVSQSRKRAFIW |
| | | AAAPEEVLPEWPEPMHVFGVPKLKISLSQGLHYAAVRSTALGAPFRPITVRD |
| | | TIGDLPSVENGDSRTNKEYKEVAVSWFQKEIRGNTIALTDHICKAMNELNLI |
| | | RCKLIPTRPGADWHDLPKRKVTLSDGRVEEMIPFCLPNTAERHNGWKGLY |
| | | GRLDWQGNFPTSVTDPQPMGKVGMCFHPEQHRILTVRECARSQGFPDSYEF |
| | | AGNINHKHRQIGNAVPPPLAFALGRKLKEALHLKKSPQHQP |
| 51 | Ascobolus | MELTPELSGVSTDLGGGGSIFAHWRMKEESPAPTEILDDLNVLEWEKTTRD |
| | Masc2 | YSKEDLRIADQLFSIEDEHQSLPFETADAEDGTPTEEEEEKELPMRTLDNFVL |
| | | YDASDLELAALDLIGTELNIHAVGTVGPIYTEGEEDEQEDEDEDVSPPVRTG |
| | | TQATSASVTQMTVELYIRNIVQYEFCFNDDGTVETWIQTTNAHYKLLQPAK |
| | | CYTSLYRPVNDCLNVITAIITLAPESTTMSLKDLLKVMDDKAQAVSYEEVE |
| | | RMSEFIVQHLDQWMETAPKKKSKLIEKSKVYIDLNNLAGIDMVSGVRPPPV |
| | | RRVTGRSSAPKKRIVRNMNDAVLLHQNETTVTNWIHQLSAGMFGRALNVL |
| | | GAETADVENLTCDPASAKFVVPQRRLHKRLKWETRGHIPVSEEEYKHIYQG |
| | | KKYAKFFEAVRAVDESKLTIKLGDLVYVLDQDPKVTQTQFATAGREGRKK |
| | | GAEKEKIQVRFGRVLSIRQPDSNSKDAQNVFIHVQWLVLGCDTILQEMASR |
| | | RELFLTDSCDTVFADVIYGVAKLTPLGAKDIPTVEFHESMATMMGENEFFV |
| | | RFKYNYQDGSFTDLKDVDAEQIGTLQPRVNTHRNPGYCSNCRIKYDNERTG |
| | | DKWIYENDTEGEPRLFRSSKGWCIYAQEFVYLQPVEKQPGTTFRVGYISEIN |
| | | KSSVIVELLARVDDDDKSGHISYSDPRHLYFTGTDIKVTFDKIIRKCFVFHDS |
| | | GDQKAKAPLMYGTLQRDLYYYRYEKRKGKAELVPVREIRSIHEQTLNDWE |
| | | SRTQIERHGAVSGKKLKGLDIFAGCGGLTLGLDLSGAVDTKWDIEFAPSAA |
| | | NTLALNFPDAQVFNQCANVLLSRAIQSEDEGSLDIEYDLQGRVLPDLPKKG |
| | | EVDFIYGGPPCQGFSGVNRYKKGNDIKNSLVATFLSYVDHYKPRFVLLENV |
| | | KGLITTKLGNSKNAEGKWEGGISNGVVKFIYRTLISMNYQCRIGLVQSGEY |
| | | GVPQSRPRVIFLAARMGERLPDLPEPMHAFEVLDSQYALPHIKRYHTTQNG |
| | | VAPLPRITIGEAVSDLPKFQYANPGVWPRHDPYSSAKAQPSDKTIEKFSVSK |
| | | ATSFVGYLLQPYHSRPQSEFQRRLRTKLVPSDEPAEKTSLLTTKLVTAHVTR |
| | | LFNKETTQRIVCVPMWPGADHRSLPKEMRPWCLVDPNSQAEKHRFWPGLF |
| | | GRLGMEDFFSTALTDVQPCGKQGKVLHPTQRRVYTVRELARAQGFPDWFA |
| | | FTDGDADSGLGGVKKWHRNIGNAVPVPLGEQIGRCIGYSVWWKDDMIAQ |
| | | LREDGADEDEEMIDGNDQWVEELNTQMAADMPGLPLLVTHLLNLCVYRR |
| | | LYGPNAKEFLPARVYDKKLEGGRRRLVWAML |
| 52 | Neurospora | MDSPDRSHGGMFIDVPAETMGFQEDYLDMFASVLSQGLAKEGDYAHHQPL |
| | Dim2 | PAGKEECLEPIAVATTITPSPDDPQLQLQLELEQQFQTESGLNGVDPAPAPES |
| | | EDEADLPDGFSDESPDDDFVVQRSKHITVDLPVSTLINPRSTFQRIDENDNLV |
| | | PPPQSTPERVAVEDLLKAAKAAGKNKEDYIEFELHDFNFYVNYAYHPQEM |
| | | RPIQLVATKVLHDKYYFDGVLKYGNTKHYVTGMQVLELPVGNYGASLHS |
| | | VKGQIWVRSKHNAKKEIYYLLKKPAFEYQRYYQPFLWIADLGKHVVDYCT |
| | | RMVERKREVTLGCFKSDFIQWASKAHGKSKAFQNWRAQHPSDDFRTSVAA |
| | | NIGYIWKEINGVAGAKRAAGDQLFRELMIVKPGQYFRQEVPPGPVVTEGDR |
| | | TVAATIVTPYIKECFGHMILGKVLRLAGEDAEKEKEVKLAKRLKIENKNAT |
| | | KADTKDDMKNDTATESLPTPLRSLPVQVLEATPIESDIVSIVSSDLPPSENNP |
| | | PPLTNGSVKPKAKANPKPKPSTQPLHAAHVKYLSQELVNKIKVGDVISTPR |
| | | DDSSNTDTKWKPTDTDDHRWFGLVQRVHTAKTKSSGRGLNSKSFDVIWFY |
| | | RPEDTPCCAMKYKWRNELFLSNHCTCQEGHHARVKGNEVLAVHPVDWFG |
| | | TPESNKGEFFVRQLYESEQRRWITLQKDHLTCYHNQPPKPPTAPYKPGDTV |
| | | LATLSPSDKFSDPYEVVEYFTQGEKETAFVRLRKLLRRRKVDRQDAPANEL |
| | | VYTEDLVDVRAERIVGKCIMRCFRPDERVPSPYDRGGTGNMFFITHRQDHG |
| | | RCVPLDTLPPTLRQGFNPLGNLGKPKLRGMDLYCGGGNFGRGLEEGGVVE |
| | | MRWANDIWDKAIHTYMANTPDPNKTNPFLGSVDDLLRLALEGKFSDNVPR |
| | | PGEVDFIAAGSPCPGFSLLTQDKKVLNQVKNQSLVASFASFVDFYRPKYGV |
| | | LENVSGIVQTFVNRKQDVLSQLFCALVGMGYQAQLILGDAWAHGAPQSRE |
| | | RVFLYFAAPGLPLPDPPLPSHSHYRVKNRNIGFLCNGESYVQRSFIPTAFKFV |
| | | SAGEGTADLPKIGDGKPDACVRFPDHRLASGITPYIRAQYACIPTHPYGMNF |
| | | IKAWNNGNGVMSKSDRDLFPSEGKTRTSDASVGWKRLNPKTLFPTVTTTS |
| | | NPSDARMGPGLHWDEDRPYTVQEMRRAQGYLDEEVLVGRTTDQWKLVG |
| | | NSVSRHMALAIGLKFREAWLGTLYDESAVVATATATATTAAAVGVTVPV |
| | | MEEPGIGTTESSRPSRSPVHTAVDLDDSKSERSRSTTPATVLSTSSAAGDGSA |
| | | NAAGLEDDDNDDMEMMEVTRKRSSPAVDEEGMRPSKVQKVEVTVASPAS |
| | | RRSSRQASRNPTASPSSKASKATTHEAPAPEELESDAESYSETYDKEGFDGD |
| | | YHSGHEDQYSEEDEEEEYAEPETMTVNGMTIVKL |
| 53 | Drosophila | MVFRVLELFSGIGGMHYAFNYAQLDGQIVAALDVNTVANAVYAHNYGSN |
| | dDnmt2 | LVKTRNIQSLSVKEVTKLQANMLLMSPPCQPHTRQGLQRDTEDKRSDALTH |
| | | LCGLIPECQELEYILMENVKGFESSQARNQFIESLERSGFHWREFILTPTQFN |
| | | VPNTRYRYYCIARKGADFPFAGGKIWEEMPGAIAQNQGLSQIAEIVEENVSP |
| | | DFLVPDDVLTKRVLVMDIIHPAQSRSMCFTKGYTHYTEGTGSAYTPLSEDE |
| | | SHRIFELVKEIDTSNQDASKSEKILQQRLDLLHQVRLRYFTPREVARLMSFPE |
| | | NFEFPPETTNRQKYRLLGNSINVKVVGELIKLLTIK |
| 54 | S. pombe | MLSTKRLRVLELYSGIGGMHYALNLANIPADIVCAIDINPQANEIYNLNHGK |
| | Pmt1 | LAKHMDISTLTAKDFDAFDCKLWTMSPSCQPFTRIGNRKDILDPRSQAFLNI |
| | | LNVLPHVNNLPEYILIENVQGFEESKAAEECRKVLRNCGYNLIEGILSPNQFN |
| | | IPNSRSRWYGLARLNFKGEWSIDDVFQFSEVAQKEGEVKRIRDYLEIERDW |
| | | SSYMVLESVLNKWGHQFDIVKPDSSSCCCFTRGYTHLVQGAGSILQMSDHE |
| | | NTHEQFERNRMALQLRYFTAREVARLMGFPESLEWSKSNVTEKCMYRLLG |
| | | NSINVKVVSYLISLLLEPLNF |
| 55 | Arabidopsis | MVMSHIFLISQIQEVEHGDSDDVNWNTDDDELAIDNFQFSPSPVHISATSPNS |
| | DRM1 | IQNRISDETVASFVEMGFSTQMIARAIEETAGANMEPMMILETLFNYSASTE |
| | | ASSSKSKVINHFIAMGFPEEHVIKAMQEHGDEDVGEITNALLTYAEVDKLRE |
| | | SEDMNININDDDDDNLYSLSSDDEEDELNNSSNEDRILQALIKMGYLREDA |
| | | AIAIERCGEDASMEEVVDFICAAQMARQFDEIYAEPDKKELMNNNKKRRTY |
| | | TETPRKPNTDQLISLPKEMIGFGVPNHPGLMMHRPVPIPDIARGPPFFYYENV |
| | | AMTPKGVWAKISSHLYDIVPEFVDSKHFCAAARKRGYIHNLPIQNRFQIQPP |
| | | QHNTIQEAFPLTKRWWPSWDGRTKLNCLLTCIASSRLTEKIREALERYDGET |
| | | PLDVQKWVMYECKKWNLVWVGKNKLAPLDADEMEKLLGFPRDHTRGGG |
| | | ISTTDRYKSLGNSFQVDTVAYHLSVLKPLFPNGINVLSLFTGIGGGEVALHR |
| | | LQIKMNVVVSVEISDANRNILRSFWEQTNQKGILREFKDVQKLDDNTIERL |
| | | MDEYGGFDLVIGGSPCNNLAGGNRHHRVGLGGEHSSLFFDYCRILEAVRRK |
| | | ARHMRR |
| 56 | Arabadopsis | MVIWNNDDDDFLEIDNFQSSPRSSPIHAMQCRVENLAGVAVTTSSLSSPTET |
| | DRM2 | TDLVQMGFSDEVFATLFDMGFPVEMISRAIKETGPNVETSVIIDTISKYSSDC |
| | | EAGSSKSKAIDHFLAMGFDEEKVVKAIQEHGEDNMEAIANALLSCPEAKKL |
| | | PAAVEEEDGIDWSSSDDDTNYTDMLNSDDEKDPNSNENGSKIRSLVKMGFS |
| | | ELEASLAVERCGENVDIAELTDFLCAAQMAREFSEFYTEHEEQKPRHNIKK |
| | | RRFESKGEPRSSVDDEPIRLPNPMIGFGVPNEPGLITHRSLPELARGPPFFYYE |
| | | NVALTPKGVWETISRHLFEIPPEFVDSKYFCVAARKRGYIHNLPINNRFQIQP |
| | | PPKYTIHDAFPLSKRWWPEWDKRTKLNCILTCTGSAQLTNRIRVALEPYNE |
| | | EPEPPKHVQRYVIDQCKKWNLVWVGKNKAAPLEPDEMESILGFPKNHTRG |
| | | GGMSRTERFKSLGNSFQVDTVAYHLSVLKPIFPHGINVLSLFTGIGGGEVAL |
| | | HRLQIKMKLVVSVEISKVNRNILKDFWEQTNQTGELIEFSDIQHLTNDTIEGL |
| | | MEKYGGFDLVIGGSPCNNLAGGNRVSRVGLEGDQSSLFFEYCRILEVVRAR |
| | | MRGS |
| 57 | Arabadopsis | MAARNKQKKRAEPESDLCFAGKPMSVVESTIRWPHRYQSKKTKLQAPTKK |
| | CMT1 | PANKGGKKEDEEIIKQAKCHFDKALVDGVLINLNDDVYVTGLPGKLKFIAK |
| | | VIELFEADDGVPYCRFRWYYRPEDTLIERFSHLVQPKRVFLSNDENDNPLTC |
| | | IWSKVNIAKVPLPKITSRIEQRVIPPCDYYYDMKYEVPYLNFTSADDGSDAS |
| | | SSLSSDSALNCFENLHKDEKFLLDLYSGCGAMSTGFCMGASISGVKLITKWS |
| | | VDINKFACDSLKLNHPETEVRNEAAEDFLALLKEWKRLCEKFSLVSSTEPVE |
| | | SISELEDEEVEENDDIDEASTGAELEPGEFEVEKFLGIMFGDPQGTGEKTLQL |
| | | MVRWKGYNSSYDTWEPYSGLGNCKEKLKEYVIDGFKSHLLPLPGTVYTVC |
| | | GGPPCQGISGYNRYRNNEAPLEDQKNQQLLVFLDIIDFLKPNYVLMENVVD |
| | | LLRFSKGFLARHAVASFVAMNYQTRLGMMAAGSYGLPQLRNRVFLWAAQ |
| | | PSEKLPPYPLPTHEVAKKENTPKEFKDLQVGRIQMEFLKLDNALTLADAISD |
| | | LPPVTNYVANDVMDYNDAAPKTEFENFISLKRSETLLPAFGGDPTRRLFDH |
| | | QPLVLGDDDLERVSYIPKQKGANYRDMPGVLVHNNKAEINPRFRAKLKSG |
| | | KNVVPAYAISFIKGKSKKPFGRLWGDEIVNTVVTRAEPHNQCVIHPMQNRV |
| | | LSVRENARLQGFPDCYKLCGTIKEKYIQVGNAVAVPVGVALGYAFGMASQ |
| | | GLTDDEPVIKLPFKYPECMQAKDQI |
| 58 | Arabadopsis | MLSPAKCESEEAQAPLDLHSSSRSEPECLSLVLWCPNPEEAAPSSTRELIKLP |
| | CMT2 | DNGEMSLRRSTTLNCNSPEENGGEGRVSQRKSSRGKSQPLLMLTNGCQLRR |
| | | SPRFRALHANFDNVCSVPVTKGGVSQRKFSRGKSQPLLTLTNGCQLRRSPR |
| | | FRAVDGNFDSVCSVPVTGKFGSRKRKSNSALDKKESSDSEGLTFKDIAVIAK |
| | | SLEMEIISECQYKNNVAEGRSRLQDPAKRKVDSDTLLYSSINSSKQSLGSNK |
| | | RMRRSQRFMKGTENEGEENLGKSKGKGMSLASCSFRRSTRLSGTVETGNT |
| | | ETLNRRKDCGPALCGAEQVRGTERLVQISKKDHCCEAMKKCEGDGLVSSK |
| | | QELLVFPSGCIKKTVNGCRDRTLGKPRSSGLNTDDIHTSSLKISKNDTSNGLT |
| | | MTTALVEQDAMESLLQGKTSACGAADKGKTREMHVNSTVIYLSDSDEPSSI |
| | | EYLNGDNLTQVESGSALSSGGNEGIVSLDLNNPTKSTKRKGKRVTRTAVQE |
| | | QNKRSICFFIGEPLSCEEAQERWRWRYELKERKSKSRGQQSEDDEDKIVAN |
| | | VECHYSQAKVDGHTFSLGDFAYIKGEEEETHVGQIVEFFKTTDGESYFRVQ |
| | | WFYRATDTIMERQATNHDKRRLFYSTVMNDNPVDCLISKVTVLQVSPRVG |
| | | LKPNSIKSDYYFDMEYCVEYSTFQTLRNPKTSENKLECCADVVPTESTESIL |
| | | KKKSFSGELPVLDLYSGCGGMSTGLSLGAKISGVDVVTKWAVDQNTAACK |
| | | SLKLNHPNTQVRNDAAGDFLQLLKEWDKLCKRYVFNNDQRTDTLRSVNST |
| | | KETSGSSSSSDDDSDSEEYEVEKLVDICFGDHDKTGKNGLKFKVHWKGYRS |
| | | DEDTWELAEELSNCQDAIREFVTSGFKSKILPLPGRVGVICGGPPCQGISGYN |
| | | RHRNVDSPLNDERNQQIIVFMDIVEYLKPSYVLMENVVDILRMDKGSLGRY |
| | | ALSRLVNMRYQARLGIMTAGCYGLSQFRSRVFMWGAVPNKNLPPFPLPTH |
| | | DVIVRYGLPLEFERNVVAYAEGQPRKLEKALVLKDAISDLPHVSNDEDREK |
| | | LPYESLPKTDFQRYIRSTKRDLTGSAIDNCNKRTMLLHDHRPFHINEDDYAR |
| | | VCQIPKRKGANFRDLPGLIVRNNTVCRDPSMEPVILPSGKPLVPGYVFTFQQ |
| | | GKSKRPFARLWWDETVPTVLTVPTCHSQALLHPEQDRVLTIRESARLQGFP |
| | | DYFQFCGTIKERYCQIGNAVAVSVSRALGYSLGMAFRGLARDEHLIKLPQN |
| | | FSHSTYPQLQETIPH |
| 59 | Arabadopsis | MAPKRKRPATKDDTTKSIPKPKKRAPKRAKTVKEEPVTVVEEGEKHVARFL |
| | CMT3 | DEPIPESEAKSTWPDRYKPIEVQPPKASSRKKTKDDEKVEIIRARCHYRRAIV |
| | | DERQIYELNDDAYVQSGEGKDPFICKIIEMFEGANGKLYFTARWFYRPSDT |
| | | VMKEFEILIKKKRVFFSEIQDTNELGLLEKKLNILMIPLNENTKETIPATENCD |
| | | FFCDMNYFLPYDTFEAIQQETMMAISESSTISSDTDIREGAAAISEIGECSQET |
| | | EGHKKATLLDLYSGCGAMSTGLCMGAQLSGLNLVTKWAVDMNAHACKS |
| | | LQHNHPETNVRNMTAEDFLFLLKEWEKLCIHFSLRNSPNSEEYANLHGLNN |
| | | VEDNEDVSEESENEDDGEVFTVDKIVGISFGVPKKLLKRGLYLKVRWLNYD |
| | | DSHDTWEPIEGLSNCRGKIEEFVKLGYKSGILPLPGGVDVVCGGPPCQGISG |
| | | HNRFRNLLDPLEDQKNKQLLVYMNIVEYLKPKFVLMENVVDMLKMAKGY |
| | | LARFAVGRLLQMNYQVRNGMMAAGAYGLAQFRLRFFLWGALPSEIIPQFP |
| | | LPTHDLVHRGNIVKEFQGNIVAYDEGHTVKLADKLLLKDVISDLPAVANSE |
| | | KRDEITYDKDPTTPFQKFIRLRKDEASGSQSKSKSKKHVLYDHHPLNLNIND |
| | | YERVCQVPKRKGANFRDFPGVIVGPGNVVKLEEGKERVKLESGKTLVPDY |
| | | ALTYVDGKSCKPFGRLWWDEIVPTVVTRAEPHNQVIIHPEQNRVLSIRENA |
| | | RLQGFPDDYKLFGPPKQKYIQVGNAVAVPVAKALGYALGTAFQGLAVGK |
| | | DPLLTLPEGFAFMKPTLPSELA |
| 60 | Neurospora | MAEQNPFVIDDEDDVIQIHDEEEVEEEVAEVIDITEDDIEPSELDRAFGSRPK |
| | Rid | EETLPSLLLRDQGFIVRPGMTVELKAPIGRFAISFVRVNSIVKVRQAHVNNV |
| | | TIRGHGFTRAKEMNGMLPKQLNECCLVASIDTRDPRP |
| 61 | E. coli | MNNNDLVAKLWKLCDNLRDGGVSYQNYVNELASLLFLKMCKETGQEAE |
| | strain 12 | YLPEGYRWDDLKSRIGQEQLQFYRKMLVHLGEDDKKLVQAVFHNVSTTIT |
| | hsdM | EPKQITALVSNMDSLDWYNGAHGKSRDDFGDMYEGLLQKNANETKSGAG |
| | | QYFTPRPLIKTIIHLLKPQPREVVQDPAAGTAGFLIEADRYVKSQTNDLDDL |
| | | DGDTQDFQIHRAFIGLELVPGTRRLALMNCLLHDIEGNLDHGGAIRLGNTL |
| | | GSDGENLPKAHIVATNPPFGSAAGTNITRTFVHPTSNKQLCFMQHIIETLHPG |
| | | GRAAVVVPDNVLFEGGKGTDIRRDLMDKCHLHTILRLPTGIFYAQGVKTNV |
| | | LFFTKGTVANPNQDKNCTDDVWVYDLRTNMPSFGKRTPFTDEHLQPFERV |
| | | YGEDPHGLSPRTEGEWSFNAEETEVADSEENKNTDQHLATSRWRKFSREWI |
| | | RTAKSDSLDISWLKDKDSIDADSLPEPDVLAAEAMGELVQALSELDALMRE |
| | | LGASDEADLQRQLLEEAFGGVKE |
| 62 | E. coli | MSAGKLPEGWVIAPVSTVTTLIRGVTYKKEQAINYLKDDYLPLIRANNIQN |
| | strain 12 | GKFDTTDLVFVPKNLVKESQKISPEDIVIAMSSGSKSVVGKSAHQHLPFECS |
| | hsdS | FGAFCGVLRPEKLIFSGFIAHFTKSSLYRNKISSLSAGANINNIKPASFDLINIPI |
| | | PPLAEQKIIAEKLDTLLAQVDSTKARFEQIPQILKRFRQAVLGGAVNGKLTE |
| | | KWRNFEPQHSVFKKLNFESILTELRNGLSSKPNESGVGHPILRISSVRAGHV |
| | | DQNDIRFLECSESELNRHKLQDGDLLFTRYNGSLEFVGVCGLLKKLQHQNL |
| | | LYPDKLIRARLTKDALPEYIEIFFSSPSARNAMMNCVKTTSGQKGISGKDIKS |
| | | QVVLLPPVKEQAEIVRRVEQLFAYADTIEKQVNNALARVNNLTQSILAKAF |
| | | RGELTAQWRAENPDLISGENSAAALLEKIKAERAASGGKKASRKKS |
| 63 | T. | MGLPPLLSLPSNSAPRSLGRVETPPEVVDFMVSLAEAPRGGRVLEPACAHGP |
| | aquaticus | FLRAFREAHGTAYRFVGVEIDPKALDLPPWAEGILADFLLWEPGEAFDLILG |
| | M TaqI | NPPYGIVGEASKYPIHVFKAVKDLYKKAFSTWKGKYNLYGAFLEKAVRLL |
| | | KPGGVLVFVVPATWLVLEDFALLREFLAREGKTSVYYLGEVFPQKKVSAV |
| | | VIRFQKSGKGLSLWDTQESESGFTPILWAEYPHWEGEIIRFETEETRKLEISG |
| | | MPLGDLFHIRFAARSPEFKKHPAVRKEPGPGLVPVLTGRNLKPGWVDYEKN |
| | | HSGLWMPKERAKELRDFYATPHLVVAHTKGTRVVAAWDERAYPWREEFH |
| | | LLPKEGVRLDPSSLVQWLNSEAMQKHVRTLYRDFVPHLTLRMLERLPVRR |
| | | EYGFHTSPESARNF |
| 64 | E. coli | MKKNRAFLKWAGGKYPLLDDIKRHLPKGECLVEPFVGAGSVFLNTDFSRYI |
| | M EcoDam | LADINSDLISLYNIVKMRTDEYVQAARELFVPETNCAEVYYQFREEFNKSQ |
| | | DPFRRAVLFLYLNRYGYNGLCRYNLRGEFNVPFGRYKKPYFPEAELYHFAE |
| | | KAQNAFFYCESYADSMARADDASVVYCDPPYAPLSATANFTAYHTNSFTL |
| | | EQQAHLAEIAEGLVERHIPVLISNHDTMLTREWYQRAKLHVVKVRRSISSN |
| | | GGTRKKVDELLALYKPGVVSPAKK |
| 65 | C. | MKFGPETIIHGDCIEQMNALPEKSVDLIFADPPYNLQLGGDLLRPDNSKVDA |
| | crescentus | VDDHWDQFESFAAYDKFTREWLKAARRVLKDDGAIWVIGSYHNIFRVGV |
| | M CcrMI | AVQDLGFWILNDIVWRKSNPMPNFKGTRFANAHETLIWASKSQNAKRYTF |
| | | NYDALKMANDEVQMRSDWTIPLCTGEERIKGADGQKAHPTQKPEALLYRV |
| | | ILSTTKPGDVILDPFFGVGTTGAAAKRLGRKFIGIEREAEYLEHAKARIAKVV |
| | | PIAPEDLDVMGSKRAEPRVPFGTIVEAGLLSPGDTLYCSKGTHVAKVRPDGS |
| | | ITVGDLSGSIHKIGALVQSAPACNGWTYWHFKTDAGLAPIDVLRAQVRAG |
| | | MIN |
| 66 | C. difficile | MDDISQDNFLLSKEYENSLDVDTKKASGIYYTPKIIVDYIVKKTLKNHDIIKN |
| | CamA | PYPRILDISCGCGNFLLEVYDILYDLFEENIYELKKKYDENYWTVDNIHRHIL |
| | | NYCIYGADIDEKAISILKDSLTNKKVVNDLDESDIKINLFCCDSLKKKWRYK |
| | | FDYIVGNPPYIGHKKLEKKYKKFLLEKYSEVYKDKADLYFCFYKKIIDILKQ |
| | | GGIGSVITPRYFLESLSGKDLREYIKSNVNVQEIVDFLGANIFKNIGVSSCILT |
| | | FDKKKTKETYIDVFKIKNEDICINKFETLEELLKSSKFEHFNINQRLLSDEWIL |
| | | VNKDDETFYNKIQEKCKYSLEDIAISFQGIITGCDKAFILSKDDVKLNLVDD |
| | | KFLKCWIKSKNINKYIVDKSEYRLIYSNDIDNENTNKRILDEIIGLYKTKLEN |
| | | RRECKSGIRKWYELQWGREKLFFERKKIMYPYKSNENRFAIDYDNNFSSAD |
| | | VYSFFIKEEYLDKFSYEYLVGILNSSVYDKYFKITAKKMSKNIYDYYPNKV |
| | | MKIRIFRDNNYEEIENLSKQIISILLNKSIDKGKVEKLQIKMDNLIMDSLGI |
| 67 | ZIM3 | MNNSQGRVTFEDVTVNFTQGEWQRLNPEQRNLYRDVMLENYSNLVSVGQ |
| | | GETTKPDVILRLEQGKEPWLEEEEVLGSGRAEKNGDIGGQIWKPKDVKESL |
| 68 | ZNF436 | MAATLLMAGSQAPVTFEDMAMYLTREEWRPLDAAQRDLYRDVMQENYG |
| | | NVVSLDFEIRSENEVNPKQEISEDVQFGTTSERPAENAEENPESEEGFESGDR |
| | | SERQW |
| 69 | ZNF257 | MLENYRNLVFLGIAVSKPDLITCLEQGKEPCNMKRHEMVAKPPVMCSHIAE |
| | | DLCPERDIKYFFQKVILRRYDKCEHENLQLRKGCKSVDECKVCK |
| 70 | ZNF675 | MGLLTFRDVAIEFSLEEWQCLDTAQRNLYKNVILENYRNLVFLGIAVSKQD |
| | | LITCLEQEKEPLTVKRHEMVNEPPVMCSHFAQEFWPEQNIKDSF |
| 71 | ZNF490 | MLQMQNSEHHGQSIKTQTDSISLEDVAVNFTLEEWALLDPGQRNIYRDVM |
| | | RATFKNLACIGEKWKDQDIEDEHKNQGRNLRSPMVEALCENKEDCPCGKS |
| | | TSQIPDLNTNLETPTG |
| 72 | ZNF320 | MALSQGLLTFRDVAIEFSQEEWKCLDPAQRTLYRDVMLENYRNLVSLDISS |
| | | KCMMNTLSSTGQGNTEVIHTGTLQRQASYHIGAFCSQEIEKDIHDFVFQ |
| 73 | ZNF331 | MAQGLVTFADVAIDFSQEEWACLNSAQRDLYWDVMLENYSNLVSLDLES |
| | | AYENKSLPTKKNIHEIRASKRNSDRRSKSLGRNWICEGTLERPQRSRGR |
| 74 | ZNF816 | MLREEATKKSKEKEPGMALPQGRLTFRDVAIEFSLEEWKCLNPAQRALYR |
| | | AVMLENYRNLEFVDSSLKSMMEFSSTRHSITGEVIHTGTLQRHKSHHIGDFC |
| | | FPEMKKDIHHFEFQWQ |
| 75 | ZNF680 | MPGPPGSLEMGPLTFRDVAIEFSLEEWQCLDTAQRNLYRKVMFENYRNLVF |
| | | LGIAVSKPHLITCLEQGKEPWNRKRQEMVAKPPVIYSHFTEDLWPEHSIKDS |
| | | F |
| 76 | ZNF41 | MSPPWSPALAAEGRGSSCEASVSFEDVTVDFSKEEWQHLDPAQRRLYWDV |
| | | TLENYSHLLSVGYQIPKSEAAFKLEQGEGPWMLEGEAPHQSCSGEAIGKMQ |
| | | QQGIPGGIFFHC |
| 77 | ZNF189 | MASPSPPPESKEEWDYLDPAQRSLYKDVMMENYGNLVSLDVLNRDKDEEP |
| | | TVKQEIEEIEEEVEPQGVIVTRIKSEIDQDPMGRETFELVGRLDKQRGIFLWEI |
| | | PRESL |
| 78 | ZNF528 | MALTQGPLKFMDVAIEFSQEEWKCLDPAQRTLYRDVMLENYRNLVSLGIC |
| | | LPDLSVTSMLEQKRDPWTLQSEEKIANDPDGRECIKGVNTERSSKLGSN |
| 79 | ZNF543 | MAASAQVSVTFEDVAVTFTQEEWGQLDAAQRTLYQEVMLETCGLLMSLG |
| | | CPLFKPELIYQLDHRQELWMATKDLSQSSYPGDNTKPKTTEPTFSHLALPE |
| 80 | ZNF554 | MFSQEERMAAGYLPRWSQELVTFEDVSMDFSQEEWELLEPAQKNLYREV |
| | | MLENYRNVVSLEALKNQCTDVGIKEGPLSPAQTSQVTSLSSWTGYLLFQPV |
| | | ASSHLEQREALWIEEKGTPQASCSDWMTVLRNQDSTYKKVALQE |
| 81 | ZNF140 | MSQGSVTFRDVAIDFSQEEWKWLQPAQRDLYRCVMLENYGHLVSLGLSIS |
| | | KPDVVSLLEQGKEPWLGKREVKRDLFSVSESSGEIKDFSPKNVIYDD |
| 82 | ZNF610 | MEEAQKRKAKESGMALPQGRLTFMDVAIEFSQEEWKSLDPGQRALYRDV |
| | | MLENYRNLVFLGRSCVLGSNAENKPIKNQLGLTLESHLSELQLFQAGRKIY |
| | | RSNQVEKFTNHR |
| 83 | ZNF264 | MAAAVLTDRAQVSVTFDDVAVTFTKEEWGQLDLAQRTLYQEVMLENCGL |
| | | LVSLGCPVPKAELICHLEHGQEPWTRKEDLSQDTCPGDKGKPKTTEPTTCEP |
| | | ALSE |
| 84 | ZNF350 | MIQAQESITLEDVAVDFTWEEWQLLGAAQKDLYRDVMLENYSNLVAVGY |
| | | QASKPDALFKLEQGEQLWTIEDGIHSGACSDIWKVDHVLERLQSESLVNR |
| 85 | ZNF8 | MEGVAGVMSVGPPAARLQEPVTFRDVAVDFTQEEWGQLDPTQRILYRDV |
| | | MLETFGHLLSIGPELPKPEVISQLEQGTELWVAERGTTQGCHPAWEPRSESQ |
| | | ASRKEEGLPEE |
| 86 | ZNF582 | MSLGSELFRDVAIVFSQEEWQWLAPAQRDLYRDVMLETYSNLVSLGLAVS |
| | | KPDVISFLEQGKEPWMVERVVSGGLCPVLESRYDTKELFPKQHVYEV |
| 87 | ZNF30 | MAHKYVGLQYHGSVTFEDVAIAFSQQEWESLDSSQRGLYRDVMLENYRN |
| | | LVSMAGHSRSKPHVIALLEQWKEPEVTVRKDGRRWCTDLQLEDDTIGCKE |
| | | MPTSEN |
| 88 | ZNF324 | MAFEDVAVYFSQEEWGLLDTAQRALYRRVMLDNFALVASLGLSTSRPRVV |
| | | IQLERGEEPWVPSGTDTTLSRTTYRRRNPGSWSLTEDRDVSG |
| 89 | ZNF98 | MLENYRNLVFVGIAASKPDLITCLEQGKEPWNVKRHEMVTEPPVVYSYFA |
| | | QDLWPKQGKKNYFQKVILRTYKKCGRENLQLRKYCKSMDECKVHKECYN |
| | | GLNQC |
| 90 | ZNF669 | MHFRRPDPCREPLASPIQDSVAFEDVAVNFTQEEWALLDSSQKNLYREVMQ |
| | | ETCRNLASVGSQWKDQNIEDHFEKPGKDIRNHIVQRLCESKEDGQYGEVVS |
| | | QIPNLDLNENISTGLKPCECSICGK |
| 91 | ZNF677 | MALSQGLFTFKDVAIEFSQEEWECLDPAQRALYRDVMLENYRNLLSLDED |
| | | NIPPEDDISVGFTSKGLSPKENNKEELYHLVILERKESHGINNFDLKEVWEN |
| | | MPKFDSLW |
| 92 | ZNF596 | MTFEDIIVDFTQEEWALLDTSQRKLFQDVMLENISHLVSIGKQLCKSVVLSQ |
| | | LEQVEKLSTQRISLLQGREVGIKHQEIPFIHHIYQKGTSTISTMRS |
| 93 | ZNF214 | MAVTFEDVTIIFTWEEWKFLDSSQKRLYREVMWENYTNVMSVENWNESY |
| | | KSQEEKFRYLEYENFSYWQGWWNAGAQMYENQNYGETVQGTDSKDLTQ |
| | | QDRSQC |
| 94 | ZNF37A | MITSQGSVSFRDVTVGFTQEEWQHLDPAQRTLYRDVMLENYSHLVSVGYC |
| | | IPKPEVILKLEKGEEPWILEEKFPSQSHLELINTSRNYSIMKFNEFNKG |
| 95 | ZNF34 | MFEDVAVYLSREEWGRLGPAQRGLYRDVMLETYGNLVSLGVGPAGPKPG |
| | | VISQLERGDEPWVLDVQGTSGKEHLRVNSPALGTRTEYKELTSQETFGEED |
| | | PQGSEPVEACDHIS |
| 96 | ZNF250 | METYGNVVSLGLPGSKPDIISQLERGEDPWVLDRKGAKKSQGLWSDYSDN |
| | | LKYDHTTACTQQDSLSCPWECETKGESQNTDLSPKPLISEQTVILGKTPLGRI |
| | | DQENNETKQ |
| 97 | ZNF547 | MAEMNPAQGHVVFEDVAIYFSQEEWGHLDEAQRLLYRDVMLENLALLSSL |
| | | GCCHGAEDEEAPLEPGVSVGVSQVMAPKPCLSTQNTQPCETCSSLLKDILRL |
| 98 | ZNF273 | MLDNYRNLVFLGIAVSKPDLITCLEQGKEPCNMKRHAMVAKPPVVCSHFA |
| | | QDLWPKQGLKDS |
| 99 | ZNF354A | MAAGQREARPQVSLTFEDVAVLFTRDEWRKLAPSQRNLYRDVMLENYRN |
| | | LVSLGLPFTKPKVISLLQQGEDPWEVEKDGSGVSSLGSKSSHKTTKSTQTQD |
| | | SSFQ |
| 100 | ZFP82 | MALRSVMFSDVSIDFSPEEWEYLDLEQKDLYRDVMLENYSNLVSLGCFISK |
| | | PDVISSLEQGKEPWKVVRKGRRQYPDLETKYETKKLSLENDIYEIN |
| 101 | ZNF224 | MTTFKEAMTFKDVAVVFTEEELGLLDLAQRKLYRDVMLENFRNLLSVGHQ |
| | | AFHRDTFHFLREEKIWMMKTAIQREGNSGDKIQTEMETVSEAGTHQEW |
| 102 | ZNF33A | MFQVEQKSQESVSFKDVTVGFTQEEWQHLDPSQRALYRDVMLENYSNLVS |
| | | VGYCVHKPEVIFRLQQGEEPWKQEEEFPSQSFPEVWTADHLKERSQENQSK |
| | | HL |
| 103 | ZNF45 | MTKSKEAVTFKDVAVVFSEEELQLLDLAQRKLYRDVMLENFRNVVSVGH |
| | | QSTPDGLPQLEREEKLWMMKMATQRDNSSGAKNLKEMETLQEVGLRYLP |
| 104 | ZNF175 | MSQKPQVLGPEKQDGSCEASVSFEDVTVDFSREEWQQLDPAQRCLYRDVM |
| | | LELYSHLFAVGYHIPNPEVIFRMLKEKEPRVEEAEVSHQRCQEREFGLEIPQ |
| | | KEISKKASFQ |
| 105 | ZNF595 | MELVTFRDVAIEFSPEEWKCLDPAQQNLYRDVMLENYRNLVSLGFVISNPD |
| | | LVTCLEQIKEPCNLKIHETAAKPPAICSPFSQDLSPVQGIEDSF |
| 106 | ZNF184 | MSTLLQGGHNLLSSASFQESVTFKDVIVDFTQEEWKQLDPGQRDLFRDVTL |
| | | ENYTHLVSIGLQVSKPDVISQLEQGTEPWIMEPSIPVGTCADWETRLENSVS |
| | | APEPDISEE |
| 107 | ZNF419 | MDPAQVPVAADLLTDHEEGYVTFEDVAVYFSQEEWRLLDDAQRLLYRNV |
| | | MLENFTLLASLGLASSKTHEITQLESWEEPFMPAWEVVTSAIPRGCWHGAE |
| | | AEEAPEQIASVG |
| 108 | ZFP28-1 | MKKLEAVGTGIEPKAMSQGLVTFGDVAVDFSQEEWEWLNPIQRNLYRKV |
| | | MLENYRNLASLGLCVSKPDVISSLEQGKEPWTVKRKMTRAWCPDLKAVW |
| | | KIKELPLKKDFCEG |
| 109 | ZFP28-2 | MSLLGEHWDYDALFETQPGLVTIKNLAVDFRQQLHPAQKNFCKNGIWENN |
| | | SDLGSAGHCVAKPDLVSLLEQEKEPWMVKRELTGSLFSGQRSVHETQELFP |
| | | KQDSYAE |
| 110 | ZNF18 | MLALAASQPARLEERLIRDRDLGASLLPAAPQEQWRQLDSTQKEQYWDLIL |
| | | ETYGKMVSGAGISHPKSDLTNSIEFGEELAGIYLHVNEKIPRPTCIGDRQEND |
| | | KENLNLENH |
| 111 | ZNF213 | MEGRPGETTDTCFVSGVHGPVALGDIPFYFSREEWGTLDPAQRDLFWDIKR |
| | | ENSRNTTLGFGLKGQSEKSLLQEMVPVVPGQTGSDVTVSWSPEEAEAWESE |
| | | NRPRAALGPVVGARRGRPPTRRRQFRDLA |
| 112 | ZNF394 | MVAVVRALQRALDGTSSQGMVTFEDTAVSLTWEEWERLDPARRDFCRES |
| | | AQKDSGSTVPPSLESRVENKELIPMQQILEEAEPQGQLQEAFQGKRPLFSKC |
| | | GSTHEDRVEKQSGDP |
| 113 | ZFP1 | MNKSQGSVSFTDVTVDFTQEEWEQLDPSQRILYMDVMLENYSNLLSVEVW |
| | | KADDQMERDHRNPDEQARQFLILKNQTPIEERGDLFGKALNLNTDFVSLRQ |
| | | VPYKYDLYEKTL |
| 114 | ZFP14 | MAHGSVTFRDVAIDFSQEEWEFLDPAQRDLYRDVMWENYSNFISLGPSISK |
| | | PDVITLLDEERKEPGMVVREGTRRYCPDLESRYRTNTLSPEKDIYEIYSFQW |
| | | DIMER |
| 115 | ZNF416 | MAAAVLRDSTSVPVTAEAKLMGFTQGCVTFEDVAIYFSQEEWGLLDEAQR |
| | | LLYRDVMLENFALITALVCWHGMEDEETPEQSVSVEGVPQVRTPEASPSTQ |
| | | KIQSCDMCVPFLTDILHLTDLPGQELYLTGACAVFHQDQK |
| 116 | ZNF557 | MLPPTAASQREGHTEGGELVNELLKSWLKGLVTFEDVAVEFTQEEWALLD |
| | | PAQRTLYRDVMLENCRNLASLGNQVDKPRLISQLEQEDKVMTEERGILSGT |
| | | CPDVENPFKAKGLTPKLHVFRKEQSRNMKMER |
| 117 | ZNF566 | MAQESVMFSDVSVDFSQEEWECLNDDQRDLYRDVMLENYSNLVSMGHSIS |
| | | KPNVISYLEQGKEPWLADRELTRGQWPVLESRCETKKLFLKKEIYEIESTQW |
| | | EIMEK |
| 118 | ZNF729 | MPGAPGSLEMGPLTFRDVTIEFSLEEWQCLDTVQQNLYRDVMLENYRNLV |
| | | FLGMAVFKPDLITCLKQGKEPWNMKRHEMVTKPPVMRSHFTQDLWPDQS |
| | | TKDSFQEVILRTYAR |
| 119 | ZIM2 | MAGSQFPDFKHLGTFLVFEELVTFEDVLVDFSPEELSSLSAAQRNLYREVM |
| | | LENYRNLVSLGHQFSKPDIISRLEEEESYAMETDSRHTVICQGE |
| 120 | ZNF254 | MPGPPRSLEMGLLTFRDVAIEFSLEEWQHLDIAQQNLYRNVMLENYRNLAF |
| | | LGIAVSKPDLITCLEQGKEPWNMKRHE |
| 121 | ZNF764 | MAPPLAPLPPRDPNGAGPEWREPGAVSFADVAVYFCREEWGCLRPAQRAL |
| | | YRDVMRETYGHLSALGIGGNKPALISWVEEEAELWGPAAQDPE |
| 122 | ZNF785 | MGPPLAPRPAHVPGEAGPRRTRESRPGAVSFADVAVYFSPEEWECLRPAQR |
| | | ALYRDVMRETFGHLGALGFSVPKPAFISWVEGEVEAWSPEAQDPDGESS |
| 123 | ZNF10 | MDAKSLTAWSRTLVTFKDVFVDFTREEWKLLDTAQQIVYRNVMLENYKN |
| | (KOX1) | LVSLGYQLTKPDVILRLEKGEEPWLVEREIHQETHPDSETAFEIKSSVSSRSIF |
| | | KDKQSCDIKMEGMARNDLWYLSLEEVWKCRDQLDKYQENPERHLRQVAF |
| | | TQKKVLTQERVSESGKYGGNCLLPAQLVLREYFHKRDSHTKSLKHDLVLN |
| | | GHQDSCASNSNECGQTFCQNIHLIQFARTHTGDKSYKCPDNDNSLTHGSSL |
| | | GISKGIHREKPYECKECGKFFSWRSNLTRHQLIHTGEKPYECKECGKSFSRSS |
| | | HLIGHQKTHTGEEPYECKECGKSFSWFSHLVTHQRTHTGDKLYTCNQCGKS |
| | | FVHSSRLIRHQRTHTGEKPYECPECGKSFRQSTHLILHQRTHVRVRPYECNE |
| | | CGKSYSQRSHLVVHHRIHTGLKPFECKDCGKCFSRSSHLYSHQRTHTGEKP |
| | | YECHDCGKSFSQSSALIVHQRIHTGEKPYECCQCGKAFIRKNDLIKHQRIHV |
| | | GEETYKCNQCGIIFSQNSPFIVHQIAHTGEQFLTCNQCGTALVNTSNLIGYQT |
| | | NHIRENAY |
| 124 | CBX5 | MGKKTKRTADSSSSEDEEEYVVEKVLDRRVVKGQVEYLLKWKGFSEEHNT |
| | (chromoshadow | WEPEKNLDCPELISEFMKKYKKMKEGENNKPREKSESNKRKSNFSNSADDI |
| | domain) | KSKKKREQSNDIARGFERGLEPEKIIGATDSCGDLMFLMKWKDTDEADLVL |
| | | AKEANVKCPQIVIAFYEERLTWHAYPEDAENKEKETAKS |
| 125 | RYBP | MTMGDKKSPTRPKRQAKPAADEGFWDCSVCTFRNSAEAFKCSICDVRKGT |
| | (YAF2_RYBP | STRKPRINSQLVAQQVAQQYATPPPPKKEKKEKVEKQDKEKPEKDKEISPS |
| | component | VTKKNTNKKTKPKSDILKDPPSEANSIQSANATTKTSETNHTSRPRLKNVDR |
| | of PRC1) | STAQQLAVTVGNVTVIITDFKEKTRSSSTSSSTVTSSAGSEQQNQSSSGSEST |
| | | DKGSSRSSTPKGDMSAVNDESF |
| 126 | YAF2 | MGDKKSPTRPKRQPKPSSDEGYWDCSVCTFRNSAEAFKCMMCDVRKGTST |
| | (YAF2_RYBP | RKPRPVSQLVAQQVTQQFVPPTQSKKEKKDKVEKEKSEKETTSKKNSHKK |
| | component | TRPRLKNVDRSSAQHLEVTVGDLTVIITDFKEKTKSPPASSAASADQHSQSG |
| | of PRC1) | SSSDNTERGMSRSSSPRGEASSLNGESH |
| 127 | MGA | MEEKQQIILANQDGGTVAGAAPTFFVILKQPGNGKTDQGILVTNQDACALA |
| | (component | SSVSSPVKSKGKICLPADCTVGGITVTLDNNSMWNEFYHRSTEMILTKQGR |
| | of | RMFPYCRYWITGLDSNLKYILVMDISPVDNHRYKWNGRWWEPSGKAEPH |
| | PRC1.6) | VLGRVFIHPESPSTGHYWMHQPVSFYKLKLTNNTLDQEGHIILHSMHRYLP |
| | | RLHLVPAEKAVEVIQLNGPGVHTFTFPQTEFFAVTAYQNIQITQLKIDYNPF |
| | | AKGFRDDGLNNKPQRDGKQKNSSDQEGNNISSSSGHRVRLTEGQGSEIQPG |
| | | DLDPLSRGHETSGKGLEKTSLNIKRDFLGFMDTDSALSEVPQLKQEISECLIA |
| | | SSFEDDSRVASPLDQNGSFNVVIKEEPLDDYDYELGECPEGVTVKQEETDEE |
| | | TDVYSNSDDDPILEKQLKRHNKVDNPEADHLSSKWLPSSPSGVAKAKMFK |
| | | LDTGKMPVVYLEPCAVTRSTVKISELPDNMLSTSRKDKSSMLAELEYLPTYI |
| | | ENSNETAFCLGKESENGLRKHSPDLRVVQKYPLLKEPQWKYPDISDSISTER |
| | | ILDDSKDSVGDSLSGKEDLGRKRTTMLKIATAAKVVNANQNASPNVPGKR |
| | | GRPRKLKLCKAGRPPKNTGKSLISTKNTPVSPGSTFPDVKPDLEDVDGVLFV |
| | | SFESKEALDIHAVDGTTEESSSLQASTTNDSGYRARISQLEKELIEDLKTLRH |
| | | KQVIHPGLQEVGLKLNSVDPTMSIDLKYLGVQLPLAPATSFPFWNLTGTNP |
| | | ASPDAGFPFVSRTGKTNDFTKIKGWRGKFHSASASRNEGGNSESSLKNRSA |
| | | FCSDKLDEYLENEGKLMETSMGFSSNAPTSPVVYQLPTKSTSYVRTLDSVL |
| | | KKQSTISPSTSYSLKPHSVPPVSRKAKSQNRQATFSGRTKSSYKSILPYPVSP |
| | | KQKYSHVILGDKVTKNSSGIISENQANNFVVPTLDENIFPKQISLRQAQQQQ |
| | | QQQQGSRPPGLSKSQVKLMDLEDCALWEGKPRTYITEERADVSLTTLLTAQ |
| | | ASLKTKPIHTIIRKRAPPCNNDFCRLGCVCSSLALEKRQPAHCRRPDCMFGC |
| | | TCLKRKVVLVKGGSKTKHFQRKAAHRDPVFYDTLGEEAREEEEGIREEEEQ |
| | | LKEKKKRKKLEYTICETEPEQPVRHYPLWVKVEGEVDPEPVYIPTPSVIEPM |
| | | KPLLLPQPEVLSPTVKGKLLTGIKSPRSYTPKPNPVIREEDKDPVYLYFESM |
| | | MTCARVRVYERKKEDQRQPSSSSSPSPSFQQQTSCHSSPENHNNAKEPDSEQ |
| | | QPLKQLTCDLEDDSDKLQEKSWKSSCNEGESSSTSYMHQRSPGGPTKLIEIIS |
| | | DCNWEEDRNKILSILSQHINSNMPQSLKVGSFIIELASQRKSRGEKNPPVYSS |
| | | RVKISMPSCQDQDDMAEKSGSETPDGPLSPGKMEDISPVQTDALDSVRERL |
| | | HGGKGLPFYAGLSPAGKLVAYKRKPSSSTSGLIQVASNAKVAASRKPRTLL |
| | | PSTSNSKMASSSGTATNRPGKNLKAFVPAKRPIAARPSPGGVFTQFVMSKV |
| | | GALQQKIPGVSTPQTLAGTQKFSIRPSPVMVVTPVVSSEPVQVCSPVTAAVT |
| | | TTTPQVFLENTTAVTPMTAISDVETKETTYSSGATTTGVVEVSETNTSTSVT |
| | | STQSTATVNLTKTTGITTPVASVAFPKSLVASPSTITLPVASTASTSLVVVTA |
| | | AASSSMVTTPTSSLGSVPIILSGINGSPPVSQRPENAAQIPVATPQVSPNTVKR |
| | | AGPRLLLIPVQQGSPTLRPVSNTQLQGHRMVLQPVRSPSGMNLFRHPNGQI |
| | | VQLLPLHQLRGSNTQPNLQPVMFRNPGSVMGIRLPAPSKPSETPPSSTSSSAF |
| | | SVMNPVIQAVGSSSAVNVITQAPSLLSSGASFVSQAGTLTLRISPPEPQSFAS |
| | | KTGSETKITYSSGGQPVGTASLIPLQSGSFALLQLPGQKPVPSSILQHVASLQ |
| | | MKRESQNPDQKDETNSIKREQETKKVLQSEGEAVDPEANVIKQNSGAATSE |
| | | ETLNDSLEDRGDHLDEECLPEEGCATVKPSEHSCITGSHTDQDYKDVNEEY |
| | | GARNRKSSKEKVAVLEVRTISEKASNKTVQNLSKVQHQKLGDVKVEQQKG |
| | | FDNPEENSSEFPVTFKEESKFELSGSKVMEQQSNLQPEAKEKECGDSLEKDR |
| | | ERWRKHLKGPLTRKCVGASQECKKEADEQLIKETKTCQENSDVFQQEQGIS |
| | | DLLGKSGITEDARVLKTECDSWSRISNPSAFSIVPRRAAKSSRGNGHFQGHL |
| | | LLPGEQIQPKQEKKGGRSSADFTVLDLEEDDEDDNEKTDDSIDEIVDVVSDY |
| | | QSEEVDDVEKNNCVEYIEDDEEHVDIETVEELSEEINVAHLKTTAAHTQSFK |
| | | QPSCTHISADEKAAERSRKAPPIPLKLKPDYWSDKLQKEAEAFAYYRRTHT |
| | | ANERRRRGEMRDLFEKLKITLGLLHSSKVSKSLILTRAFSEIQGLTDQADKLI |
| | | GQKNLLTRKRNILIRKVSSLSGKTEEVVLKKLEYIYAKQQALEAQKRKKKM |
| | | GSDEFDISPRISKQQEGSSASSVDLGQMFINNRRGKPLILSRKKDQATENTSP |
| | | LNTPHTSANLVMTPQGQLLTLKGPLFSGPVVAVSPDLLESDLKPQVAGSAV |
| | | ALPENDDLFMMPRIVNVTSLATEGGLVDMGGSKYPHEVPDSKPSDHLKDT |
| | | VRNEDNSLEDKGRISSRGNRDGRVTLGPTQVFLANKDSGYPQIVDVSNMQ |
| | | KAQEFLPKKISGDMRGIQYKWKESESRGERVKSKDSSFHKLKMKDLKDSSI |
| | | EMELRKVTSAIEEAALDSSELLTNMEDEDDTDETLTSLLNEIAFLNQQLNDD |
| | | SVGLAELPSSMDTEFPGDARRAFISKVPPGSRATFQVEHLGTGLKELPDVQG |
| | | ESDSISPLLLHLEDDDFSENEKQLAEPASEPDVLKIVIDSEIKDSLLSNKKAID |
| | | GGKNTSGLPAEPESVSSPPTLHMKTGLENSNSTDTLWRPMPKLAPLGLKVA |
| | | NPSSDADGQSLKVMPCLAPIAAKVGSVGHKMNLTGNDQEGRESKVMPTLA |
| | | PVVAKLGNSGASPSSAGK |
| 128 | CBX1 | MGKKQNKKKVEEVLEEEEEEYVVEKVLDRRVVKGKVEYLLKWKGFSDED |
| | (chromoshadow) | NTWEPEENLDCPDLIAEFLQSQKTAHETDKSEGGKRKADSDSEDKGEESKP |
| | | KKKKEESEKPRGFARGLEPERIIGATDSSGELMFLMKWKNSDEADLVPAKE |
| | | ANVKCPQVVISFYEERLTWHSYPSEDDDKKDDKN |
| 129 | SCMH1 | MLVCYSVLACEILWDLPCSIMGSPLGHFTWDKYLKETCSVPAPVHCFKQSY |
| | (SAM_1/SPM) | TPPSNEFKISMKLEAQDPRNTTSTCIATVVGLTGARLRLRLDGSDNKNDFW |
| | | RLVDSAEIQPIGNCEKNGGMLQPPLGFRLNASSWPMFLLKTLNGAEMAPIRI |
| | | FHKEPPSPSHNFFKMGMKLEAVDRKNPHFICPATIGEVRGSEVLVTFDGWR |
| | | GAFDYWCRFDSRDIFPVGWCSLTGDNLQPPGTKVVIPKNPYPASDVNTEKP |
| | | SIHSSTKTVLEHQPGQRGRKPGKKRGRTPKTLISHPISAPSKTAEPLKFPKKR |
| | | GPKPGSKRKPRTLLNPPPASPTTSTPEPDTSTVPQDAATIPSSAMQAPTVCIY |
| | | LNKNGSTGPHLDKKKVQQLPDHFGPARASVVLQQAVQACIDCAYHQKTVF |
| | | SFLKQGHGGEVISAVFDREQHTLNLPAVNSITYVLRFLEKLCHNLRSDNLFG |
| | | NQPFTQTHLSLTAIEYSHSHDRYLPGETFVLGNSLARSLEPHSDSMDSASNP |
| | | TNLVSTSQRHRPLLSSCGLPPSTASAVRRLCSRGVLKGSNERRDMESFWKL |
| | | NRSPGSDRYLESRDASRLSGRDPSSWTVEDVMQFVREADPQLGPHADLFRK |
| | | HEIDGKALLLLRSDMMMKYMGLKLGPALKLSYHIDRLKQGKF |
| 130 | MPP8 | MEQVAEGARVTAVPVSAADSTEELAEVEEGVGVVGEDNDAAARGAEAFG |
| | (Chromodomain) | DSEEDGEDVFEVEKILDMKTEGGKVLYKVRWKGYTSDDDTWEPEIHLEDC |
| | | KEVLLEFRKKIAENKAKAVRKDIQRLSLNNDIFEANSDSDQQSETKEDTSPK |
| | | KKKKKLRQREEKSPDDLKKKKAKAGKLKDKSKPDLESSLESLVFDLRTKK |
| | | RISEAKEELKESKKPKKDEVKETKELKKVKKGEIRDLKTKTREDPKENRKT |
| | | KKEKFVESQVESESSVLNDSPFPEDDSEGLHSDSREEKQNTKSARERAGQD |
| | | MGLEHGFEKPLDSAMSAEEDTDVRGRRKKKTPRKAEDTRENRKLENKNAF |
| | | LEKKTVPKKQRNQDRSKSAAELEKLMPVSAQTPKGRRLSGEERGLWSTDS |
| | | AEEDKETKRNESKEKYQKRHDSDKEEKGRKEPKGLKTLKEIRNAFDLFKLT |
| | | PEEKNDVSENNRKREEIPLDFKTIDDHKTKENKQSLKERRNTRDETDTWAY |
| | | IAAEGDQEVLDSVCQADENSDGRQQILSLGMDLQLEWMKLEDFQKHLDGK |
| | | DENFAATDAIPSNVLRDAVKNGDYITVKVALNSNEEYNLDQEDSSGMTLV |
| | | MLAAAGGQDDLLRLLITKGAKVNGRQKNGTTALIHAAEKNFLTTVAILLEA |
| | | GAFVNVQQSNGETALMKACKRGNSDIVRLVIECGADCNILSKHQNSALHFA |
| | | KQSNNVLVYDLLKNHLETLSRVAEETIKDYFEARLALLEPVFPIACHRLCEG |
| | | PDFSTDFNYKPPQNIPEGSGILLFIFHANFLGKEVIARLCGPCSVQAVVLNDK |
| | | FQLPVFLDSHFVYSFSPVAGPNKLFIRLTEAPSAKVKLLIGAYRVQLQ |
| 131 | SUMO3 | MSEEKPKEGVKTENDHINLKVAGQDGSVVQFKIKRHTPLSKLMKAYCERQ |
| | (Rad60- | GLSMRQIRFRFDGQPINETDTPAQLEMEDEDTIDVFQQQTGGVPESSLAGHS |
| | SLD) | F |
| 132 | HERC2 | MPSESFCLAAQARLDSKWLKTDIQLAFTRDGLCGLWNEMVKDGEIVYTGT |
| | (Cyt-b5) | ESTQNGELPPRKDDSVEPSGTKKEDLNDKEKKDEEETPAPIYRAKSILDSWV |
| | | WGKQPDVNELKECLSVLVKEQQALAVQSATTTLSALRLKQRLVILERYFIA |
| | | LNRTVFQENVKVKWKSSGISLPPVDKKSSRPAGKGVEGLARVGSRAALSFA |
| | | FAFLRRAWRSGEDADLCSELLQESLDALRALPEASLFDESTVSSVWLEVVE |
| | | RATRFLRSVVTGDVHGTPATKGPGSIPLQDQHLALAILLELAVQRGTLSQM |
| | | LSAILLLLQLWDSGAQETDNERSAQGTSAPLLPLLQRFQSIICRKDAPHSEGD |
| | | MHLLSGPLSPNESFLRYLTLPQDNELAIDLRQTAVVVMAHLDRLATPCMPP |
| | | LCSSPTSHKGSLQEVIGWGLIGWKYYANVIGPIQCEGLANLGVTQIACAEKR |
| | | FLILSRNGRVYTQAYNSDTLAPQLVQGLASRNIVKIAAHSDGHHYLALAAT |
| | | GEVYSWGCGDGGRLGHGDTVPLEEPKVISAFSGKQAGKHVVHIACGSTYS |
| | | AAITAEGELYTWGRGNYGRLGHGSSEDEAIPMLVAGLKGLKVIDVACGSG |
| | | DAQTLAVTENGQVWSWGDGDYGKLGRGGSDGCKTPKLIEKLQDLDVVKV |
| | | RCGSQFSIALTKDGQVYSWGKGDNQRLGHGTEEHVRYPKLLEGLQGKKVI |
| | | DVAAGSTHCLALTEDSEVHSWGSNDQCQHFDTLRVTKPEPAALPGLDTKHI |
| | | VGIACGPAQSFAWSSCSEWSIGLRVPFVVDICSMTFEQLDLLLRQVSEGMD |
| | | GSADWPPPQEKECVAVATLNLLRLQLHAAISHQVDPEFLGLGLGSILLNSLK |
| | | QTVVTLASSAGVLSTVQSAAQAVLQSGWSVLLPTAEERARALSALLPCAVS |
| | | GNEVNISPGRRFMIDLLVGSLMADGGLESALHAAITAEIQDIEAKKEAQKEK |
| | | EIDEQEANASTFHRSRTPLDKDLINTGICESSGKQCLPLVQLIQQLLRNIASQT |
| | | VARLKDVARRISSCLDFEQHSRERSASLDLLLRFQRLLISKLYPGESIGQTSDI |
| | | SSPELMGVGSLLKKYTALLCTHIGDILPVAASIASTSWRHFAEVAYIVEGDF |
| | | TGVLLPELVVSIVLLLSKNAGLMQEAGAVPLLGGLLEHLDRFNHLAPGKER |
| | | DDHEELAWPGIMESFFTGQNCRNNEEVTLIRKADLENHNKDGGFWTVIDG |
| | | KVYDIKDFQTQSLTGNSILAQFAGEDPVVALEAALQFEDTRESMHAFCVGQ |
| | | YLEPDQEIVTIPDLGSLSSPLIDTERNLGLLLGLHASYLAMSTPLSPVEIECAK |
| | | WLQSSIFSGGLQTSQIHYSYNEEKDEDHCSSPGGTPASKSRLCSHRRALGDH |
| | | SQAFLQAIADNNIQDHNVKDFLCQIERYCRQCHLTTPIMFPPEHPVEEVGRL |
| | | LLCCLLKHEDLGHVALSLVHAGALGIEQVKHRTLPKSVVDVCRVVYQAKC |
| | | SLIKTHQEQGRSYKEVCAPVIERLRFLFNELRPAVCNDLSIMSKFKLLSSLPR |
| | | WRRIAQKIIRERRKKRVPKKPESTDDEEKIGNEESDLEEACILPHSPINVDKR |
| | | PIAIKSPKDKWQPLLSTVTGVHKYKWLKQNVQGLYPQSPLLSTIAEFALKEE |
| | | PVDVEKMRKCLLKQLERAEVRLEGIDTILKLASKNFLLPSVQYAMFCGWQ |
| | | RLIPEGIDIGEPLTDCLKDVDLIPPFNRMLLEVTFGKLYAWAVQNIRNVLMD |
| | | ASAKFKELGIQPVPLQTITNENPSGPSLGTIPQARFLLVMLSMLTLQHGANN |
| | | LDLLLNSGMLALTQTALRLIGPSCDNVEEDMNASAQGASATVLEETRKETA |
| | | PVQLPVSGPELAAMMKIGTRVMRGVDWKWGDQDGPPPGLGRVIGELGED |
| | | GWIRVQWDTGSTNSYRMGKEGKYDLKLAELPAAAQPSAEDSDTEDDSEAE |
| | | QTERNIHPTAMMFTSTINLLQTLCLSAGVHAEIMQSEATKTLCGLLRMLVES |
| | | GTTDKTSSPNRLVYREQHRSWCTLGFVRSIALTPQVCGALSSPQWITLLMK |
| | | VVEGHAPFTATSLQRQILAVHLLQAVLPSWDKTERARDMKCLVEKLFDFL |
| | | GSLLTTCSSDVPLLRESTLRRRRVRPQASLTATHSSTLAEEVVALLRTLHSLT |
| | | QWNGLINKYINSQLRSITHSFVGRPSEGAQLEDYFPDSENPEVGGLMAVLA |
| | | VIGGIDGRLRLGGQVMHDEFGEGTVTRITPKGKITVQFSDMRTCRVCPLNQ |
| | | LKPLPAVAFNVNNLPFTEPMLSVWAQLVNLAGSKLEKHKIKKSTKQAFAG |
| | | QVDLDLLRCQQLKLYILKAGRALLSHQDKLRQILSQPAVQETGTVHTDDGA |
| | | VVSPDLGDMSPEGPQPPMILLQQLLASATQPSPVKAIFDKQELEAAALAVC |
| | | QCLAVESTHPSSPGFEDCSSSEATTPVAVQHIRPARVKRRKQSPVPALPIVVQ |
| | | LMEMGFSRRNIEFALKSLTGASGNASSLPGVEALVGWLLDHSDIQVTELSD |
| | | ADTVSDEYSDEEVVEDVDDAAYSMSTGAVVTESQTYKKRADFLSNDDYA |
| | | VYVRENIQVGMMVRCCRAYEEVCEGDVGKVIKLDRDGLHDLNVQCDWQ |
| | | QKGGTYWVRYIHVELIGYPPPSSSSHIKIGDKVRVKASVTTPKYKWGSVTH |
| | | QSVGVVKAFSANGKDIIVDFPQQSHWTGLLSEMELVPSIHPGVTCDGCQMF |
| | | PINGSRFKCRNCDDFDFCETCFKTKKHNTRHTFGRINEPGQSAVFCGRSGKQ |
| | | LKRCHSSQPGMLLDSWSRMVKSLNVSSSVNQASRLIDGSEPCWQSSGSQGK |
| | | HWIRLEIFPDVLVHRLKMIVDPADSSYMPSLVVVSGGNSLNNLIELKTININP |
| | | SDTTVPLLNDCTEYHRYIEIAIKQCRSSGIDCKIHGLILLGRIRAEEEDLAAVP |
| | | FLASDNEEEEDEKGNSGSLIRKKAAGLESAATIRTKVFVWGLNDKDQLGGL |
| | | KGSKIKVPSFSETLSALNVVQVAGGSKSLFAVTVEGKVYACGEATNGRLGL |
| | | GISSGTVPIPRQITALSSYVVKKVAVHSGGRHATALTVDGKVFSWGEGDDG |
| | | KLGHFSRMNCDKPRLIEALKTKRIRDIACGSSHSAALTSSGELYTWGLGEYG |
| | | RLGHGDNTTQLKPKMVKVLLGHRVIQVACGSRDAQTLALTDEGLVFSWG |
| | | DGDFGKLGRGGSEGCNIPQNIERLNGQGVCQIECGAQFSLALTKSGVVWT |
| | | WGKGDYFRLGHGSDVHVRKPQVVEGLRGKKIVHVAVGALHCLAVTDSGQ |
| | | VYAWGDNDHGQQGNGTTTVNRKPTLVQGLEGQKITRVACGSSHSVAWTT |
| | | VDVATPSVHEPVLFQTARDPLGASYLGVPSDADSSAASNKISGASNSKPNRP |
| | | SLAKILLSLDGNLAKQQALSHILTALQIMYARDAVVGALMPAAMIAPVECP |
| | | SFSSAAPSDASAMASPMNGEECMLAVDIEDRLSPNPWQEKREIVSSEDAVT |
| | | PSAVTPSAPSASARPFIPVTDDLGAASIIAETMTKTKEDVESQNKAAGPEPQA |
| | | LDEFTSLLIADDTRVVVDLLKLSVCSRAGDRGRDVLSAVLSGMGTAYPQV |
| | | ADMLLELCVTELEDVATDSQSGRLSSQPVVVESSHPYTDDTSTSGTVKIPGA |
| | | EGLRVEFDRQCSTERRHDPLTVMDGVNRIVSVRSGREWSDWSSELRIPGDE |
| | | LKWKFISDGSVNGWGWRFTVYPIMPAAGPKELLSDRCVLSCPSMDLVTCL |
| | | LDFRLNLASNRSIVPRLAASLAACAQLSALAASHRMWALQRLRKLLTTEFG |
| | | QSININRLLGENDGETRALSFTGSALAALVKGLPEALQRQFEYEDPIVRGGK |
| | | QLLHSPFFKVLVALACDLELDTLPCCAETHKWAWFRRYCMASRVAVALD |
| | | KRTPLPRLFLDEVAKKIRELMADSENMDVLHESHDIFKREQDEQLVQWMN |
| | | RRPDDWTLSAGGSGTIYGWGHNHRGQLGGIEGAKVKVPTPCEALATLRPV |
| | | QLIGGEQTLFAVTADGKLYATGYGAGGRLGIGGTESVSTPTLLESIQHVFIK |
| | | KVAVNSGGKHCLALSSEGEVYSWGEAEDGKLGHGNRSPCDRPRVIESLRGI |
| | | EVVDVAAGGAHSACVTAAGDLYTWGKGRYGRLGHSDSEDQLKPKLVEAL |
| | | QGHRVVDIACGSGDAQTLCLTDDDTVWSWGDGDYGKLGRGGSDGCKVP |
| | | MKIDSLTGLGVVKVECGSQFSVALTKSGAVYTWGKGDYHRLGHGSDDHV |
| | | RRPRQVQGLQGKKVIAIATGSLHCVCCTEDGEVYTWGDNDEGQLGDGTTN |
| | | AIQRPRLVAALQGKKVNRVACGSAHTLAWSTSKPASAGKLPAQVPMEYNH |
| | | LQEIPIIALRNRLLLLHHLSELFCPCIPMFDLEGSLDETGLGPSVGFDTLRGILI |
| | | SQGKEAAFRKVVQATMVRDRQHGPVVELNRIQVKRSRSKGGLAGPDGTKS |
| | | VFGQMCAKMSSFGPDSLLLPHRVWKVKFVGESVDDCGGGYSESIAEICEEL |
| | | QNGLTPLLIVTPNGRDESGANRDCYLLSPAARAPVHSSMFRFLGVLLGIAIR |
| | | TGSPLSLNLAEPVWKQLAGMSLTIADLSEVDKDFIPGLMYIRDNEATSEEFE |
| | | AMSLPFTVPSASGQDIQLSSKHTHITLDNRAEYVRLAINYRLHEFDEQVAAV |
| | | REGMARVVPVPLLSLFTGYELETMVCGSPDIPLHLLKSVATYKGIEPSASLIQ |
| | | WFWEVMESFSNTERSLFLRFVWGRTRLPRTIADFRGRDFVIQVLDKYNPPD |
| | | HFLPESYTCFFLLKLPRYSCKQVLEEKLKYAIHFCKSIDTDDYARIALTGEPA |
| | | ADDSSDDSDNEDVDSFASDSTQDYLTGH |
| 133 | BIN1 | MAEMGSKGVTAGKIASNVQKKLTRAQEKVLQKLGKADETKDEQFEQCVQ |
| | (SH3_9) | NFNKQLTEGTRLQKDLRTYLASVKAMHEASKKLNECLQEVYEPDWPGRDE |
| | | ANKIAENNDLLWMDYHQKLVDQALLTMDTYLGQFPDIKSRIAKRGRKLVD |
| | | YDSARHHYESLQTAKKKDEAKIAKPVSLLEKAAPQWCQGKLQAHLVAQT |
| | | NLLRNQAEEELIKAQKVFEEMNVDLQEELPSLWNSRVGFYVNTFQSIAGLE |
| | | ENFHKEMSKLNQNLNDVLVGLEKQHGSNTFTVKAQPSDNAPAKGNKSPSP |
| | | PDGSPAATPEIRVNHEPEPAGGATPGATLPKSPSQLRKGPPVPPPPKHTPSKE |
| | | VKQEQILSLFEDTFVPEISVTTPSQFEAPGPFSEQASLLDLDFDPLPPVTSPVK |
| | | APTPSGQSIPWDLWEPTESPAGSLPSGEPSAAEGTFAVSWPSQTAEPGPAQP |
| | | AEASEVAGGTQPAAGAQEPGETAASEAASSSLPAVVVETFPATVNGTVEGG |
| | | SGAGRLDLPPGFMFKVQAQHDYTATDTDELQLKAGDVVLVIPFQNPEEQD |
| | | EGWLMGVKESDWNQHKELEKCRGVFPENFTERVP |
| 134 | PCGF2 | MHRTTRIKITELNPHLMCALCGGYFIDATTIVECLHSFCKTCIVRYLETNKY |
| | (RING | CPMCDVQVHKTRPLLSIRSDKTLQDIVYKLVPGLFKDEMKRRRDFYAAYPL |
| | finger | TEVPNGSNEDRGEVLEQEKGALSDDEIVSLSIEFYEGARDRDEKKGPLENGD |
| | protein | GDKEKTGVRFLRCPAAMTVMHLAKFLRNKMDVPSKYKVEVLYEDEPLKE |
| | domain) | YYTLMDIAYIYPWRRNGPLPLKYRVQPACKRLTLATVPTPSEGTNTSGASE |
| | | CESVSDKAPSPATLPATSSSLPSPATPSHGSPSSHGPPATHPTSPTPPSTASGA |
| | | TTAANGGSLNCLQTPSSTSRGRKMTVNGAPVPPLT |
| 135 | TOX | MDVRFYPPPAQPAAAPDAPCLGPSPCLDPYYCNKFDGENMYMSMTEPSQD |
| | (HMG | YVPASQSYPGPSLESEDFNIPPITPPSLPDHSLVHLNEVESGYHSLCHPMNHN |
| | box) | GLLPFHPQNMDLPEITVSNMLGQDGTLLSNSISVMPDIRNPEGTQYSSHPQM |
| | | AAMRPRGQPADIRQQPGMMPHGQLTTINQSQLSAQLGLNMGGSNVPHNSP |
| | | SPPGSKSATPSPSSSVHEDEGDDTSKINGGEKRPASDMGKKPKTPKKKKKK |
| | | DPNEPQKPVSAYALFFRDTQAAIKGQNPNATFGEVSKIVASMWDGLGEEQ |
| | | KQVYKKKTEAAKKEYLKQLAAYRASLVSKSYSEPVDVKTSQPPQLINSKPS |
| | | VFHGPSQAHSALYLSSHYHQQPGMNPHLTAMHPSLPRNIAPKPNNQMPVT |
| | | VSIANMAVSPPPPLQISPPLHQHLNMQQHQPLTMQQPLGNQLPMQVQSALH |
| | | SPTMQQGFTLQPDYQTIINPTSTAAQVVTQAMEYVRSGCRNPPPQPVDWNN |
| | | DYCSSGGMQRDKALYLT |
| 136 | FOXA1 | MLGTVKMEGHETSDWNSYYADTQEAYSSVPVSNMNSGLGSMNSMNTYM |
| | (HNF3A | TMNTMTTSGNMTPASFNMSYANPGLGAGLSPGAVAGMPGGSAGAMNSM |
| | C-terminal | TAAGVTAMGTALSPSGMGAMGAQQAASMNGLGPYAAAMNPCMSPMAY |
| | domain) | APSNLGRSRAGGGGDAKTFKRSYPHAKPPYSYISLITMAIQQAPSKMLTLSE |
| | | IYQWIMDLFPYYRQNQQRWQNSIRHSLSFNDCFVKVARSPDKPGKGSYWT |
| | | LHPDSGNMFENGCYLRRQKRFKCEKQPGAGGGGGSGSGGSGAKGGPESRK |
| | | DPSGASNPSADSPLHRGVHGKTGQLEGAPAPGPAASPQTLDHSGATATGGA |
| | | SELKTPASSTAPPISSGPGALASVPASHPAHGLAPHESQLHLKGDPHYSFNHP |
| | | FSINNLMSSSEQQHKLDFKAYEQALQYSPYGSTLPASLPLGSASVTTRSPIEP |
| | | SALEPAYYQGVYSRPVLNTS |
| 137 | FOXA2 | MLGAVKMEGHEPSDWSSYYAEPEGYSSVSNMNAGLGMNGMNTYMSMSA |
| | (HNF3B | AAMGSGSGNMSAGSMNMSSYVGAGMSPSLAGMSPGAGAMAGMGGSAG |
| | C-terminal | AAGVAGMGPHLSPSLSPLGGQAAGAMGGLAPYANMNSMSPMYGQAGLSR |
| | domain) | ARDPKTYRRSYTHAKPPYSYISLITMAIQQSPNKMLTLSEIYQWIMDLFPFY |
| | | RQNQQRWQNSIRHSLSFNDCFLKVPRSPDKPGKGSFWTLHPDSGNMFENG |
| | | CYLRRQKRFKCEKQLALKEAAGAAGSGKKAAAGAQASQAQLGEAAGPAS |
| | | ETPAGTESPHSSASPCQEHKRGGLGELKGTPAAALSPPEPAPSPGQQQQAAA |
| | | HLLGPPHHPGLPPEAHLKPEHHYAFNHPFSINNLMSSEQQHHHSHHHHQPH |
| | | KMDLKAYEQVMHYPGYGSPMPGSLAMGPVTNKTGLDASPLAADTSYYQG |
| | | VYSRPIMNSS |
| 138 | IRF2BP1 | MASVQASRRQWCYLCDLPKMPWAMVWDFSEAVCRGCVNFEGADRIELLI |
| | (IRF- | DAARQLKRSHVLPEGRSPGPPALKHPATKDLAAAAAQGPQLPPPQAQPQPS |
| | 2BP1_2 N- | GTGGGVSGQDRYDRATSSGRLPLPSPALEYTLGSRLANGLGREEAVAEGAR |
| | terminal | RALLGSMPGLMPPGLLAAAVSGLGSRGLTLAPGLSPARPLFGSDFEKEKQQ |
| | domain) | RNADCLAELNEAMRGRAEEWHGRPKAVREQLLALSACAPFNVRFKKDHG |
| | | LVGRVFAFDATARPPGYEFELKLFTEYPCGSGNVYAGVLAVARQMFHDAL |
| | | REPGKALASSGFKYLEYERRHGSGEWRQLGELLTDGVRSFREPAPAEALPQ |
| | | QYPEPAPAALCGPPPRAPSRNLAPTPRRRKASPEPEGEAAGKMTTEEQQQR |
| | | HWVAPGGPYSAETPGVPSPIAALKNVAEALGHSPKDPGGGGGPVRAGGAS |
| | | PAASSTAQPPTQHRLVARNGEAEVSPTAGAEAVSGGGSGTGATPGAPLCCT |
| | | LCRERLEDTHFVQCPSVPGHKFCFPCSREFIKAQGPAGEVYCPSGDKCPLVG |
| | | SSVPWAFMQGEIATILAGDIKVKKERDP |
| 139 | IRF2BP2 | MAAAVAVAAASRRQSCYLCDLPRMPWAMIWDFTEPVCRGCVNYEGADR |
| | (IRF- | VEFVIETARQLKRAHGCFPEGRSPPGAAASAAAKPPPLSAKDILLQQQQQLG |
| | 2BP1_2 N- | HGGPEAAPRAPQALERYPLAAAAERPPRLGSDFGSSRPAASLAQPPTPQPPP |
| | terminal | VNGILVPNGFSKLEEPPELNRQSPNPRRGHAVPPTLVPLMNGSATPLPTALG |
| | domain) | LGGRAAASLAAVSGTAAASLGSAQPTDLGAHKRPASVSSSAAVEHEQREA |
| | | AAKEKQPPPPAHRGPADSLSTAAGAAELSAEGAGKSRGSGEQDWVNRPKT |
| | | VRDTLLALHQHGHSGPFESKFKKEPALTAGRLLGFEANGANGSKAVARTA |
| | | RKRKPSPEPEGEVGPPKINGEAQPWLSTSTEGLKIPMTPTSSFVSPPPPTASPH |
| | | SNRTTPPEAAQNGQSPMAALILVADNAGGSHASKDANQVHSTTRRNSNSPP |
| | | SPSSMNQRRLGPREVGGQGAGNTGGLEPVHPASLPDSSLATSAPLCCTLCH |
| | | ERLEDTHFVQCPSVPSHKFCFPCSRQSIKQQGASGEVYCPSGEKCPLVGSNV |
| | | PWAFMQGEIATILAGDVKVKKERDS |
| 140 | IRF2BPL | MSAAQVSSSRRQSCYLCDLPRMPWAMIWDFSEPVCRGCVNYEGADRIEFVI |
| | IRF- | ETARQLKRAHGCFQDGRSPGPPPPVGVKTVALSAKEAAAAAAAAAAAAA |
| | 2BP1_2 N- | AAQQQQQQQQQQQQQQQQQQQQQQQQQLNHVDGSSKPAVLAAPSGLER |
| | terminal | YGLSAAAAAAAAAAAAVEQRSRFEYPPPPVSLGSSSHTARLPNGLGGPNGF |
| | domain | PKPTPEEGPPELNRQSPNSSSAAASVASRRGTHGGLVTGLPNPGGGGGPQLT |
| | | VPPNLLPQTLLNGPASAAVLPPPPPHALGSRGPPTPAPPGAPGGPACLGGTP |
| | | GVSATSSSASSSTSSSVAEVGVGAGGKRPGSVSSTDQERELKEKQRNAEAL |
| | | AELSESLRNRAEEWASKPKMVRDTLLTLAGCTPYEVRFKKDHSLLGRVFAF |
| | | DAVSKPGMDYELKLFIEYPTGSGNVYSSASGVAKQMYQDCMKDFGRGLSS |
| | | GFKYLEYEKKHGSGDWRLLGDLLPEAVRFFKEGVPGADMLPQPYLDASCP |
| | | MLPTALVSLSRAPSAPPGTGALPPAAPSGRGAAASLRKRKASPEPPDSAEGA |
| | | LKLGEEQQRQQWMANQSEALKLTMSAGGFAAPGHAAGGPPPPPPPLGPHS |
| | | NRTTPPESAPQNGPSPMAALMSVADTLGTAHSPKDGSSVHSTTASARRNSS |
| | | SPVSPASVPGQRRLASRNGDLNLQVAPPPPSAHPGMDQVHPQNIPDSPMAN |
| | | SGPLCCTICHERLEDTHFVQCPSVPSHKFCFPCSRESIKAQGATGEVYCPSGE |
| | | KCPLVGSNVPWAFMQGEIATILAGDVKVKKERDP |
| 141 | HOXA13 | MTASVLLHPRWIEPTVMFLYDNGGGLVADELNKNMEGAAAAAAAAAAA |
| | (homeodomain) | AAAGAGGGGFPHPAAAAAGGNFSVAAAAAAAAAAAANQCRNLMAHPAP |
| | | LAPGAASAYSSAPGEAPPSAAAAAAAAAAAAAAAAAASSSGGPGPAGPAG |
| | | AEAAKQCSPCSAAAQSSSGPAALPYGYFGSGYYPCARMGPHPNAIKSCAQP |
| | | ASAAAAAAFADKYMDTAGPAAEEFSSRAKEFAFYHQGYAAGPYHHHQPM |
| | | PGYLDMPVVPGLGGPGESRHEPLGLPMESYQPWALPNGWNGQMYCPKEQ |
| | | AQPPHLWKSTLPDVVSHPSDASSYRRGRKKRVPYTKVQLKELEREYATNK |
| | | FITKDKRRRISATTNLSERQVTIWFQNRRVKEKKVINKLKTTS |
| 142 | HOXB13 | MEPGNYATLDGAKDIEGLLGAGGGRNLVAHSPLTSHPAAPTLMPAVNYAP |
| | (homeodomain) | LDLPGSAEPPKQCHPCPGVPQGTSPAPVPYGYFGGGYYSCRVSRSSLKPCA |
| | | QAATLAAYPAETPTAGEEYPSRPTEFAFYPGYPGTYQPMASYLDVSVVQTL |
| | | GAPGEPRHDSLLPVDSYQSWALAGGWNSQMCCQGEQNPPGPFWKAAFAD |
| | | SSGQHPPDACAFRRGRKKRIPYSKGQLRELEREYAANKFITKDKRRKISAAT |
| | | SLSERQITIWFQNRRVKEKKVLAKVKNSATP |
| 143 | HOXC13 | MTTSLLLHPRWPESLMYVYEDSAAESGIGGGGGGGGGGGGAGGGCSGAS |
| | (homeodomain) | PGKAPSMDGLGSSCPASHCRDLLPHPVLGRPPAPLGAPQGAVYTDIPAPEA |
| | | ARQCAPPPAPPTSSSATLGYGYPFGGSYYGCRLSHNVNLQQKPCAYHPGDK |
| | | YPEPSGALPGDDLSSRAKEFAFYPSFASSYQAMPGYLDVSVVPGISGHPEPR |
| | | HDALIPVEGYQHWALSNGWDSQVYCSKEQSQSAHLWKSPFPDVVPLQPEV |
| | | SSYRRGRKKRVPYTKVQLKELEKEYAASKFITKEKRRRISATTNLSERQVTI |
| | | WFQNRRVKEKKVVSKSKAPHLHST |
| 144 | HOXA11 | MDFDERGPCSSNMYLPSCTYYVSGPDFSSLPSFLPQTPSSRPMTYSYSSNLP |
| | (homeodomain) | QVQPVREVTFREYAIEPATKWHPRGNLAHCYSAEELVHRDCLQAPSAAGV |
| | | PGDVLAKSSANVYHHPTPAVSSNFYSTVGRNGVLPQAFDQFFETAYGTPEN |
| | | LASSDYPGDKSAEKGPPAATATSAAAAAAATGAPATSSSDSGGGGGCRET |
| | | AAAAEEKERRRRPESSSSPESSSGHTEDKAGGSSGQRTRKKRCPYTKYQIRE |
| | | LEREFFFSVYINKEKRLQLSRMLNLTDRQVKIWFQNRRMKEKKINRDRLQY |
| | | YSANPLL |
| 145 | HOXC11 | MFNSVNLGNFCSPSRKERGADFGERGSCASNLYLPSCTYYMPEFSTVSSFLP |
| | (homeodomain) | QAPSRQISYPYSAQVPPVREVSYGLEPSGKWHHRNSYSSCYAAADELMHRE |
| | | CLPPSTVTEILMKNEGSYGGHHHPSAPHATPAGFYSSVNKNSVLPQAFDRFF |
| | | DNAYCGGGDPPAEPPCSGKGEAKGEPEAPPASGLASRAEAGAEAEAEEENT |
| | | NPSSSGSAHSVAKEPAKGAAPNAPRTRKKRCPYSKFQIRELEREFFFNVYIN |
| | | KEKRLQLSRMLNLTDRQVKIWFQNRRMKEKKLSRDRLQYFSGNPLL |
| 146 | HOXC10 | MTCPRNVTPNSYAEPLAAPGGGERYSRSAGMYMQSGSDFNCGVMRGCGL |
| | (homeodomain) | APSLSKRDEGSSPSLALNTYPSYLSQLDSWGDPKAAYRLEQPVGRPLSSCSY |
| | | PPSVKEENVCCMYSAEKRAKSGPEAALYSHPLPESCLGEHEVPVPSYYRAS |
| | | PSYSALDKTPHCSGANDFEAPFEQRASLNPRAEHLESPQLGGKVSFPETPKS |
| | | DSQTPSPNEIKTEQSLAGPKGSPSESEKERAKAADSSPDTSDNEAKEEIKAEN |
| | | TTGNWLTAKSGRKKRCPYTKHQTLELEKEFLFNMYLTRERRLEISKTINLTD |
| | | RQVKIWFQNRRMKLKKMNRENRIRELTSNFNFT |
| 147 | HOXA10 | MSARKGYLLPSPNYPTTMSCSESPAANSFLVDSLISSGRGEAGGGGGGAGG |
| | (homeodomain) | GGGGGYYAHGGVYLPPAADLPYGLQSCGLFPTLGGKRNEAASPGSGGGGG |
| | | GLGPGAHGYGPSPIDLWLDAPRSCRMEPPDGPPPPPQQQPPPPPQPPQPAPQ |
| | | ATSCSFAQNIKEESSYCLYDSADKCPKVSATAAELAPFPRGPPPDGCALGTS |
| | | SGVPVPGYFRLSQAYGTAKGYGSGGGGAQQLGAGPFPAQPPGRGFDLPPA |
| | | LASGSADAARKERALDSPPPPTLACGSGGGSQGDEEAHASSSAAEELSPAPS |
| | | ESSKASPEKDSLGNSKGENAANWLTAKSGRKKRCPYTKHQTLELEKEFLFN |
| | | MYLTRERRLEISRSVHLTDRQVKIWFQNRRMKLKKMNRENRIRELTANFNF |
| | | S |
| 148 | HOXB9 | MSISGTLSSYYVDSIISHESEDAPPAKFPSGQYASSRQPGHAEHLEFPSCSFQP |
| | (homeodomain) | KAPVFGASWAPLSPHASGSLPSVYHPYIQPQGVPPAESRYLRTWLEPAPRGE |
| | | AAPGQGQAAVKAEPLLGAPGELLKQGTPEYSLETSAGREAVLSNQRPGYG |
| | | DNKICEGSEDKERPDQTNPSANWLHARSSRKKRCPYTKYQTLELEKEFLFN |
| | | MYLTRDRRHEVARLLNLSERQVKIWFQNRRMKMKKMNKEQGKE |
| 149 | HOXA9 | MATTGALGNYYVDSFLLGADAADELSVGRYAPGTLGQPPRQAATLAEHPD |
| | (homeodomain) | FSPCSFQSKATVFGASWNPVHAAGANAVPAAVYHHHHHHPYVHPQAPVA |
| | | AAAPDGRYMRSWLEPTPGALSFAGLPSSRPYGIKPEPLSARRGDCPTLDTHT |
| | | LSLTDYACGSPPVDREKQPSEGAFSENNAENESGGDKPPIDPNNPAANWLH |
| | | ARSTRKKRCPYTKHQTLELEKEFLFNMYLTRDRRYEVARLLNLTERQVKIW |
| | | FQNRRMKMKKINKDRAKDE |
| 150 | ZFP28_ | NKKLEAVGTGIEPKAMSQGLVTFGDVAVDFSQEEWEWLNPIQRNLYRKVM |
| | HUMAN | LENYRNLASLGLCVSKPDVISSLEQGKEPW |
| 151 | ZN334_ | KMKKFQIPVSFQDLTVNFTQEEWQQLDPAQRLLYRDVMLENYSNLVSVGY |
| | HUMAN | HVSKPDVIFKLEQGEEPWIVEEFSNQNYPD |
| 152 | ZN568_ | CSQESALSEEEEDTTRPLETVTFKDVAVDLTQEEWEQMKPAQRNLYRDVM |
| | HUMAN | LENYSNLVTVGCQVTKPDVIFKLEQEEEPW |
| 153 | ZN37A_ | ITSQGSVSFRDVTVGFTQEEWQHLDPAQRTLYRDVMLENYSHLVSVGYCIP |
| | UHMAN | KPEVILKLEKGEEPWILEEKFPSQSHLEL |
| 154 | ZN181_ | PQVTFNDVAIDFTHEEWGWLSSAQRDLYKDVMVQNYENLVSVAGLSVTK |
| | UHMAN | PYVITLLEDGKEPWMMEKKLSKGMIPDWESR |
| 155 | ZN510_ | PLRFSTLFQEQQKMNISQASVSFKDVTIEFTQEEWQQMAPVQKNLYRDVML |
| | HUMAN | ENYSNLVSVGYCCFKPEVIFKLEQGEEPW |
| 156 | ZN862_ | QDPSAEGLSEEVPVVFEELPVVFEDVAVYFTREEWGMLDKRQKELYRDVM |
| | HUMAN | RMNYELLASLGPAAAKPDLISKLERRAAPW |
| 157 | ZN140_ | SQGSVTFRDVAIDFSQEEWKWLQPAQRDLYRCVMLENYGHLVSLGLSISKP |
| | HUMAN | DVVSLLEQGKEPWLGKREVKRDLFSVSES |
| 158 | ZN208_ | GSLTFRDVAIEFSLEEWQCLDTAQQNLYRNVMLENYRNLVFLGIAAFKPDL |
| | HUMAN | IIFLEEGKESWNMKRHEMVEESPVICSHF |
| 159 | ZN248_ | NKSQEQVSFKDVCVDFTQEEWYLLDPAQKILYRDVILENYSNLVSVGYCIT |
| | HUMAN | KPEVIFKIEQGEEPWILEKGFPSQCHPER |
| 160 | ZN571_ | PHLLVTFRDVAIDFSQEEWECLDPAQRDLYRDVMLENYSNLISLDLESSCVT |
| | HUMAN | KKLSPEKEIYEMESLQWENMGKRINHHL |
| 161 | ZN699_ | EEERKTAELQKNRIQDSVVFEDVAVDFTQEEWALLDLAQRNLYRDVMLEN |
| | HUMAN | FQNLASLGYPLHTPHLISQWEQEEDLQTVK |
| 162 | ZN726_ | GLLTFRDVAIEFSLEEWQCLDTAQKNLYRNVMLENYRNLAFLGIAVSKPDL |
| | HUMAN | IICLEKEKEPWNMKRDEMVDEPPGICPHF |
| 163 | ZIK1_ | RAPTQVTVSPETHMDLTKGCVTFEDIAIYFSQDEWGLLDEAQRLLYLEVML |
| | MHUAN | ENFALVASLGCGHGTEDEETPSDQNVSVG |
| 164 | ZNF2_ | AAVSPTTRCQESVTFEDVAVVFTDEEWSRLVPIQRDLYKEVMLENYNSIVS |
| | MHUAN | LGLPVPQPDVIFQLKRGDKPWMVDLHGSE |
| 165 | Z705F_ | HSLEKVTFEDVAIDFTQEEWDMMDTSKRKLYRDVMLENISHLVSLGYQISK |
| | HUMAN | SYIILQLEQGKELWREGRVFLQDQNPDRE |
| 166 | ZNF14_ | DSVSFEDVAVNFTLEEWALLDSSQKKLYEDVMQETFKNLVCLGKKWEDQ |
| | HUMAN | DIEDDHRNQGKNRRCHMVERLCESRRGSKCG |
| 167 | ZN471_ | NVEVVKVMPQDLVTFKDVAIDFSQEEWQWMNPAQKRLYRSMMLENYQS |
| | HUMAN | LVSLGLCISKPYVISLLEQGREPWEMTSEMTR |
| 168 | ZN624_ | TQPDEDLHLQAEETQLVKESVTFKDVAIDFTLEEWRLMDPTQRNLHKDVM |
| | HUMAN | LENYRNLVSLGLAVSKPDMISHLENGKGPW |
| 169 | ZNF84_ | TMLQESFSFDDLSVDFTQKEWQLLDPSQKNLYKDVMLENYSSLVSLGYEV |
| | HUMAN | MKPDVIFKLEQGEEPWVGDGEIPSSDSPEV |
| 170 | ZNF7_ | EVVTFGDVAVHFSREEWQCLDPGQRALYREVMLENHSSVAGLAGFLVFKP |
| | HUMAN | ELISRLEQGEEPWVLDLQGAEGTEAPRTSK |
| 171 | ZN891_ | RNAEEERMIAVFLTTWLQEPMTFKDVAVEFTQEEWMMLDSAQRSLYRDV |
| | HUMAN | MLENYRNLTSVEYQLYRLTVISPLDQEEIRN |
| 172 | ZN337_ | GPQGARRQAFLAFGDVTVDFTQKEWRLLSPAQRALYREVTLENYSHLVSL |
| | HUMAN | GILHSKPELIRRLEQGEVPWGEERRRRPGP |
| 173 | Z705G_ | HSLKKLTFEDVAIDFTQEEWAMMDTSKRKLYRDVMLENISHLVSLGYQISK |
| | HUMAN | SYIILQLEQGKELWREGRVFLQDQNPNRE |
| 174 | ZN529_ | MPEVEFPDQFFTVLTMDHELVTLRDVVINFSQEEWEYLDSAQRNLYWDVM |
| | HUMAN | MENYSNLLSLDLESRNETKHLSVGKDIIQN |
| 175 | ZN729_ | PGAPGSLEMGPLTFRDVTIEFSLEEWQCLDTVQQNLYRDVMLENYRNLVFL |
| | HUMAN | GMAVFKPDLITCLKQGKEPWNMKRHEMVT |
| 176 | ZN419_ | RDPAQVPVAADLLTDHEEGYVTFEDVAVYFSQEEWRLLDDAQRLLYRNV |
| | HUMAN | MLENFTLLASLGLASSKTHEITQLESWEEPF |
| 177 | Z705A_ | HSLKKVTFEDVAIDFTQEEWAMMDTSKRKLYRDVMLENISHLVSLGYQISK |
| | HUMAN | SYIILQLEQGKELWREGREFLQDQNPDRE |
| 178 | ZNF45_ | TKSKEAVTFKDVAVVFSEEELQLLDLAQRKLYRDVMLENFRNVVSVGHQS |
| | HUMAN | TPDGLPQLEREEKLWMMKMATQRDNSSGAK |
| 179 | ZN302_ | SQVTFSDVAIDFSHEEWACLDSAQRDLYKDVMVQNYENLVSVGLSVTKPY |
| | HUMAN | VIMLLEDGKEPWMMEKKLSKAYPFPLSHSV |
| 180 | ZN486_ | PGPLRSLEMESLQFRDVAVEFSLEEWHCLDTAQQNLYRDVMLENYRHLVF |
| | UHMAN | LGIIVSKPDLITCLEQGIKPLTMKRHEMIA |
| 181 | ZN621_ | LQTTWPQESVTFEDVAVYFTQNQWASLDPAQRALYGEVMLENYANVASL |
| | HUMAN | VAFPFPKPALISHLERGEAPWGPDPWDTEIL |
| 182 | ZN688_ | APLLAPRPGETRPGCRKPGTVSFADVAVYFSPEEWGCLRPAQRALYRDVM |
| | HUMAN | QETYGHLGALGFPGPKPALISWMEQESEAW |
| 183 | ZN33A_ | NKVEQKSQESVSFKDVTVGFTQEEWQHLDPSQRALYRDVMLENYSNLVSV |
| | UHMAN | GYCVHKPEVIFRLQQGEEPWKQEEEFPSQS |
| 184 | ZN554_ | CFSQEERMAAGYLPRWSQELVTFEDVSMDFSQEEWELLEPAQKNLYREVM |
| | HUMAN | LENYRNVVSLEALKNQCTDVGIKEGPLSPA |
| 185 | ZN878_ | DSVAFEDVAVNFTQEEWALLDPSQKNLYREVMQETLRNLTSIGKKWNNQY |
| | HUMAN | IEDEHQNPRRNLRRLIGERLSESKESHQHG |
| 186 | ZN772_ | MGPAQVPMNSEVIVDPIQGQVNFEDVFVYFSQEEWVLLDEAQRLLYRDVM |
| | HUMAN | LENFALMASLGHTSFMSHIVASLVMGSEPW |
| 187 | ZN224_ | TTFKEAMTFKDVAVVFTEEELGLLDLAQRKLYRDVMLENFRNLLSVGHQA |
| | HUMAN | FHRDTFHFLREEKIWMMKTAIQREGNSGDK |
| 188 | ZN184_ | DSTLLQGGHNLLSSASFQEAVTFKDVIVDFTQEEWKQLDPGQRDLFRDVTL |
| | HUMAN | ENYTHLVSIGLQVSKPDVISQLEQGTEPW |
| 189 | ZN544_ | EARSMLVPPQASVCFEDVAMAFTQEEWEQLDLAQRTLYREVTLETWEHIV |
| | HUMAN | SLGLFLSKSDVISQLEQEEDLCRAEQEAPR |
| 190 | ZNF57_ | DSVVFEDVAVDFTLEEWALLDSAQRDLYRDVMLETFRNLASVDDGTQFKA |
| | HUMAN | NGSVSLQDMYGQEKSKEQTIPNFTGNNSCA |
| 191 | ZN283_ | EESHGALISSCNSRTMTDGLVTFRDVAIDFSQEEWECLDPAQRDLYVDVML |
| | HUMAN | ENYSNLVSLDLESKTYETKKIFSENDIFE |
| 192 | ZN549_ | VITPQIPMVTEEFVKPSQGHVTFEDIAVYFSQEEWGLLDEAQRCLYHDVML |
| | HUMAN | ENFSLMASVGCLHGIEAEEAPSEQTLSAQ |
| 193 | ZN211_ | VQLRPQTRMATALRDPASGSVTFEDVAVYFSWEEWDLLDEAQKHLYFDV |
| | HUMAN | MLENFALTSSLGCWCGVEHEETPSEQRISGE |
| 194 | ZN615_ | MQAQESLTLEDVAVDFTWEEWQFLSPAQKDLYRDVMLENYSNLVAVGYQ |
| | HUMAN | ASKPDALSKLERGEETCTTEDEIYSRICSEI |
| 195 | ZN253_ | GPLQFRDVAIEFSLEEWHCLDTAQRNLYRDVMLENYRNLVFLGIVVSKPDL |
| | HUMAN | VTCLEQGKKPLTMERHEMIAKPPVMSSHF |
| 196 | ZN226_ | NMFKEAVTFKDVAVAFTEEELGLLGPAQRKLYRDVMVENFRNLLSVGHPP |
| | HUMAN | FKQDVSPIERNEQLWIMTTATRRQGNLGEK |
| 197 | ZN730_ | GALTFRDVAIEFSLEEWQCLDTEQQNLYRNVMLDNYRNLVFLGIAVSKPDL |
| | HUMAN | ITCLEQEKEPWNLKTHDMVAKPPVICSHI |
| 198 | Z585A_ | SPQKSSALAPEDHGSSYEGSVSFRDVAIDFSREEWRHLDPSQRNLYRDVML |
| | HUMAN | ETYSHLLSVGYQVPEAEVVMLEQGKEPWA |
| 199 | ZN732_ | ELLTFRDVAIEFSPEEWKCLDPAQQNLYRDVMLENYRNLISLGVAISNPDLV |
| | HUMAN | IYLEQRKEPYKVKIHETVAKHPAVCSHF |
| 200 | ZN681_ | EPLKFRDVAIEFSLEEWQCLDTIQQNLYRNVMLENYRNLVFLGIVVSKPDLI |
| | HUMAN | TCLEQEKEPWTRKRHRMVAEPPVICSHF |
| 201 | ZN667_ | PSARGKSKSKAPITFGDLAIYFSQEEWEWLSPIQKDLYEDVMLENYRNLVSL |
| | HUMAN | GLSFRRPNVITLLEKGKAPWMVEPVRRR |
| 202 | ZN649_ | TKAQESLTLEDVAVDFTWEEWQFLSPAQKDLYRDVMLENYSNLVSVGYQ |
| | HUMAN | AGKPDALTKLEQGEPLWTLEDEIHSPAHPEI |
| 203 | ZN470_ | SQEEVEVAGIKLCKAMSLGSVTFTDVAIDFSQDEWEWLNLAQRSLYKKVM |
| | HUMAN | LENYRNLVSVGLCISKPDVISLLEQEKDPW |
| 204 | ZN484_ | TKSLESVSFKDVTVDFSRDEWQQLDLAQKSLYREVMLENYFNLISVGCQVP |
| | HUMAN | KPEVIFSLEQEEPCMLDGEIPSQSRPDGD |
| 205 | ZN431_ | SGCPGAERNLLVYSYFEKETLTFRDVAIEFSLEEWECLNPAQQNLYMNVML |
| | HUMAN | ENYKNLVFLGVAVSKQDPVTCLEQEKEPW |
| 206 | ZN382_ | PLQGSVSFKDVTVDFTQEEWQQLDPAQKALYRDVMLENYCHFVSVGFHM |
| | HUMAN | AKPDMIRKLEQGEELWTQRIFPSYSYLEEDG |
| 207 | ZN254_ | PGPPRSLEMGLLTFRDVAIEFSLEEWQHLDIAQQNLYRNVMLENYRNLAFL |
| | HUMAN | GIAVSKPDLITCLEQGKEPWNMKRHEMVD |
| 208 | ZN124_ | SGHPGSWEMNSVAFEDVAVNFTQEEWALLDPSQKNLYRDVMQETFRNLA |
| | HUMAN | SIGNKGEDQSIEDQYKNSSRNLRHIISHSGN |
| 209 | ZN607_ | SYGSITFGDVAIDFSHQEWEYLSLVQKTLYQEVMMENYDNLVSLAGHSVS |
| | HUMAN | KPDLITLLEQGKEPWMIVREETRGECTDLD |
| 210 | ZN317_ | DLFVCSGLEPHTPSVGSQESVTFQDVAVDFTEKEWPLLDSSQRKLYKDVML |
| | HUMAN | ENYSNLTSLGYQVGKPSLISHLEQEEEPR |
| 211 | ZN620_ | FQTAWRQEPVTFEDVAVYFTQNEWASLDSVQRALYREVMLENYANVASL |
| | HUMAN | AFPFTTPVLVSQLEQGELPWGLDPWEPMGRE |
| 212 | ZN141_ | ELLTFRDVAIEFSPEEWKCLDPDQQNLYRDVMLENYRNLVSLGVAISNPDL |
| | HUMAN | VTCLEQRKEPYNVKIHKIVARPPAMCSHF |
| 213 | ZN584_ | AGEAEAQLDPSLQGLVMFEDVTVYFSREEWGLLNVTQKGLYRDVMLENF |
| | HUMAN | ALVSSLGLAPSRSPVFTQLEDDEQSWVPSWV |
| 214 | ZN540_ | AHALVTFRDVAIDFSQKEWECLDTTQRKLYRDVMLENYNNLVSLGYSGSK |
| | HUMAN | PDVITLLEQGKEPCVVARDVTGRQCPGLLS |
| 215 | ZN75D_ | KRIKHWKMASKLILPESLSLLTFEDVAVYFSEEEWQLLNPLEKTLYNDVMQ |
| | HUMAN | DIYETVISLGLKLKNDTGNDHPISVSTSE |
| 216 | ZN555_ | DSVVFEDVAVDFTLEEWALLDSAQRDLYRDVMLETFQNLASVDDETQFKA |
| | HUMAN | SGSVSQQDIYGEKIPKESKIATFTRNVSWA |
| 217 | ZN658_ | NMSQASVSFQDVTVEFTREEWQHLGPVERTLYRDVMLENYSHLISVGYCIT |
| | HUMAN | KPKVISKLEKGEEPWSLEDEFLNQRYPGY |
| 218 | ZN684_ | ISFQESVTFQDVAVDFTAEEWQLLDCAERTLYWDVMLENYRNLISVGCPIT |
| | HUMAN | KTKVILKVEQGQEPWMVEGANPHESSPES |
| 219 | RBAK_ | NTLQGPVSFKDVAVDFTQEEWQQLDPDEKITYRDVMLENYSHLVSVGYDT |
| | HUMAN | TKPNVIIKLEQGEEPWIMGGEFPCQHSPEA |
| 220 | ZN829_ | HPEEEERMHDELLQAVSKGPVMFRDVSIDFSQEEWECLDADQMNLYKEV |
| | HUMAN | MLENFSNLVSVGLSNSKPAVISLLEQGKEPW |
| 221 | ZN582_ | SLGSELFRDVAIVFSQEEWQWLAPAQRDLYRDVMLETYSNLVSLGLAVSKP |
| | HUMAN | DVISFLEQGKEPWMVERVVSGGLCPVLES |
| 222 | ZN112_ | TKFQEMVTFKDVAVVFTEEELGLLDSVQRKLYRDVMLENFRNLLLVAHQP |
| | HUMAN | FKPDLISQLEREEKLLMVETETPRDGCSGR |
| 223 | ZN716_ | AKRPGPPGSREMGLLTFRDIAIEFSLAEWQCLDHAQQNLYRDVMLENYRNL |
| | HUMAN | VSLGIAVSKPDLITCLEQNKEPQNIKRNE |
| 224 | HKR1_ | TCMVHRQTMSCSGAGGITAFVAFRDVAVYFTQEEWRLLSPAQRTLHREVM |
| | HUMAN | LETYNHLVSLEIPSSKPKLIAQLERGEAPW |
| 225 | ZN350_ | IQAQESITLEDVAVDFTWEEWQLLGAAQKDLYRDVMLENYSNLVAVGYQ |
| | HUMAN | ASKPDALFKLEQGEQLWTIEDGIHSGACSDI |
| 226 | ZN480_ | AQKRRKRKAKESGMALPQGHLTFRDVAIEFSQAEWKCLDPAQRALYKDV |
| | HUMAN | MLENYRNLVSLGISLPDLNINSMLEQRREPW |
| 227 | ZN416_ | DSTSVPVTAEAKLMGFTQGCVTFEDVAIYFSQEEWGLLDEAQRLLYRDVM |
| | HUMAN | LENFALITALVCWHGMEDEETPEQSVSVEG |
| 228 | ZNF92_ | GPLTFRDVKIEFSLEEWQCLDTAQRNLYRDVMLENYRNLVFLGIAVSKPDLI |
| | HUMAN | TWLEQGKEPWNLKRHEMVDKTPVMCSHF |
| 229 | ZN100_ | SGCPGAERSLLVQSYFEKGPLTFRDVAIEFSLEEWQCLDSAQQGLYRKVML |
| | HUMAN | ENYRNLVFLAGIALTKPDLITCLEQGKEP |
| 230 | ZN736_ | GVLTFRDVAVEFSPEEWECLDSAQQRLYRDVMLENYGNLVSLGLAIFKPDL |
| | HUMAN | MTCLEQRKEPWKVKRQEAVAKHPAGSFHF |
| 231 | ZNF74_ | KENLEDISGWGLPEARSKESVSFKDVAVDFTQEEWGQLDSPQRALYRDVM |
| | HUMAN | LENYQNLLALGPPLHKPDVISHLERGEEPW |
| 232 | CBX1_ | EESEKPRGFARGLEPERIIGATDSSGELMFLMKWKNSDEADLVPAKEANVK |
| | HUMAN | CPQVVISFYEERLTWHSYPSEDDDKKDDK |
| 233 | ZN443_ | ASVALEDVAVNFTREEWALLGPCQKNLYKDVMQETIRNLDCVVMKWKD |
| | HUMAN | QNIEDQYRYPRKNLRCRMLERFVESKDGTQCG |
| 234 | ZN195_ | TLLTFRDVAIEFSLEEWKCLDLAQQNLYRDVMLENYRNLFSVGLTVCKPGL |
| | HUMAN | ITCLEQRKEPWNVKRQEAADGHPEMGFHH |
| 235 | ZN530_ | AAALRAPTQQVFVAFEDVAIYFSQEEWELLDEMQRLLYRDVMLENFAVM |
| | HUMAN | ASLGCWCGAVDEGTPSAESVSVEELSQGRTP |
| 236 | ZN782_ | NTFQASVSFQDVTVEFSQEEWQHMGPVERTLYRDVMLENYSHLVSVGYCF |
| | HUMAN | TKPELIFTLEQGEDPWLLEKEKGFLSRNSP |
| 237 | ZN791_ | DSVAFEDVSVSFSQEEWALLAPSQKKLYRDVMQETFKNLASIGEKWEDPN |
| | HUMAN | VEDQHKNQGRNLRSHTGERLCEGKEGSQCA |
| 238 | ZN331_ | AQGLVTFADVAIDFSQEEWACLNSAQRDLYWDVMLENYSNLVSLDLESAY |
| | HUMAN | ENKSLPTEKNIHEIRASKRNSDRRSKSLGR |
| 239 | Z354C_ | AVDLLSAQEPVTFRDVAVFFSQDEWLHLDSAQRALYREVMLENYSSLVSL |
| | HUMAN | GIPFSMPKLIHQLQQGEDPCMVEREVPSDT |
| 240 | ZN157_ | SPQRFPALIPGEPGRSFEGSVSFEDVAVDFTRQEWHRLDPAQRTMHKDVML |
| | HUMAN | ETYSNLASVGLCVAKPEMIFKLERGEELW |
| 241 | ZN727_ | RVLTFRDVAVEFSPEEWECLDSAQQRLYRDVMLENYGNLFSLGLAIFKPDL |
| | HUMAN | ITYLEQRKEPWNARRQKTVAKHPAGSLHF |
| 242 | ZN550_ | AETKDAAQMLVTFKDVAVTFTREEWRQLDLAQRTLYREVMLETCGLLVSL |
| | HUMAN | GHRVPKPELVHLLEHGQELWIVKRGLSHAT |
| 243 | ZN793_ | IEYQIPVSFKDVVVGFTQEEWHRLSPAQRALYRDVMLETYSNLVSVGYEGT |
| | HUMAN | KPDVILRLEQEEAPWIGEAACPGCHCWED |
| 244 | ZN235_ | TKFQEAVTFKDVAVAFTEEELGLLDSAQRKLYRDVMLENFRNLVSVGHQS |
| | HUMAN | FKPDMISQLEREEKLWMKELQTQRGKHSGD |
| 245 | ZNF8_ | DEGVAGVMSVGPPAARLQEPVTFRDVAVDFTQEEWGQLDPTQRILYRDVM |
| | HUMAN | LETFGHLLSIGPELPKPEVISQLEQGTELW |
| 246 | ZN724_ | GPLTFMDVAIEFSVEEWQCLDTAQQNLYRNVMLENYRNLVFLGIAVSKPD |
| | HUMAN | LITCLEQGKEPWNMERHEMVAKPPGMCCYF |
| 247 | ZN573_ | HQVGLIRSYNSKTMTCFQELVTFRDVAIDFSRQEWEYLDPNQRDLYRDVM |
| | HUMAN | LENYRNLVSLGGHSISKPVVVDLLERGKEP |
| 248 | ZN577_ | NATIVMSVRREQGSSSGEGSLSFEDVAVGFTREEWQFLDQSQKVLYKEVM |
| | HUMAN | LENYINLVSIGYRGTKPDSLFKLEQGEPPG |
| 249 | ZN789_ | FPPARGKELLSFEDVAMYFTREEWGHLNWGQKDLYRDVMLENYRNMVLL |
| | HUMAN | GFQFPKPEMICQLENWDEQWILDLPRTGNRK |
| 250 | ZN718_ | ELLTFKDVAIEFSPEEWKCLDTSQQNLYRDVMLENYRNLVSLGVSISNPDL |
| | HUMAN | VTSLEQRKEPYNLKIHETAARPPAVCSHF |
| 251 | ZN300_ | MKSQGLVSFKDVAVDFTQEEWQQLDPSQRTLYRDVMLENYSHLVSMGYP |
| | HUMAN | VSKPDVISKLEQGEEPWIIKGDISNWIYPDE |
| 252 | ZN383_ | AEGSVMFSDVSIDFSQEEWDCLDPVQRDLYRDVMLENYGNLVSMGLYTPK |
| | HUMAN | PQVISLLEQGKEPWMVGRELTRGLCSDLES |
| 253 | ZN429_ | GPLTFTDVAIEFSLEEWQCLDTAQQNLYRNVMLENYRNLVFLGIAVSKPDLI |
| | HUMAN | TCLEKEKEPCKMKRHEMVDEPPVVCSHF |
| 254 | ZN677_ | ALSQGLFTFKDVAIEFSQEEWECLDPAQRALYRDVMLENYRNLLSLDEDNI |
| | HUMAN | PPEDDISVGFTSKGLSPKENNKEELYHLV |
| 255 | ZN850_ | NMEGLVMFQDLSIDFSQEEWECLDAAQKDLYRDVMMENYSSLVSLGLSIP |
| | HUMAN | KPDVISLLEQGKEPWMVSRDVLGGWCRDSE |
| 256 | ZN454_ | AVSHLPTMVQESVTFKDVAILFTQEEWGQLSPAQRALYRDVMLENYSNLV |
| | HUMAN | SLGLLGPKPDTFSQLEKREVWMPEDTPGGF |
| 257 | ZN257_ | GPLTIRDVTVEFSLEEWHCLDTAQQNLYRDVMLENYRNLVFLGIAVSKPDL |
| | HUMAN | ITCLEQGKEPCNMKRHEMVAKPPVMCSHI |
| 258 | ZN264_ | AAAVLTDRAQVSVTFDDVAVTFTKEEWGQLDLAQRTLYQEVMLENCGLL |
| | HUMAN | VSLGCPVPKAELICHLEHGQEPWTRKEDLSQ |
| 259 | ZFP82_ | ALRSVMFSDVSIDFSPEEWEYLDLEQKDLYRDVMLENYSNLVSLGCFISKP |
| | HUMAN | DVISSLEQGKEPWKVVRKGRRQYPDLETK |
| 260 | ZFP14_ | AHGSVTFRDVAIDFSQEEWEFLDPAQRDLYRDVMWENYSNFISLGPSISKPD |
| | HUMAN | VITLLDEERKEPGMVVREGTRRYCPDLE |
| 261 | ZN485_ | APRAQIQGPLTFGDVAVAFTRIEWRHLDAAQRALYRDVMLENYGNLVSVG |
| | HUMAN | LLSSKPKLITQLEQGAEPWTEVREAPSGTH |
| 262 | ZN737_ | GPLQFRDVAIEFSLEEWHCLDTAQRNLYRNVMLENYRNLVFLGIVVSKPDL |
| | HUMAN | ITCLEQGKKPLTMKKHEMVANPSVTCSHF |
| 263 | ZNF44_ | TLPRGQPEVLEWGLPKDQDSVAFEDVAVNFTHEEWALLGPSQKNLYRDV |
| | HUMAN | MRETIRNLNCIGMKWENQNIDDQHQNLRRNP |
| 264 | ZN596_ | PSPDSMTFEDIIVDFTQEEWALLDTSQRKLFQDVMLENISHLVSIGKQLCKS |
| | HUMAN | VVLSQLEQVEKLSTQRISLLQGREVGIK |
| 265 | ZN565_ | EESREIRAGQIVLKAMAQGLVTFRDVAIEFSLEEWKCLEPAQRDLYREVTLE |
| | HUMAN | NFGHLASLGLSISKPDVVSLLEQGKEPW |
| 266 | ZN543_ | AASAQVSVTFEDVAVTFTQEEWGQLDAAQRTLYQEVMLETCGLLMSLGCP |
| | HUMAN | LFKPELIYQLDHRQELWMATKDLSQSSYPG |
| 267 | ZFP69_ | RESLEDEVTPGLPTAESQELLTFKDISIDFTQEEWGQLAPAHQNLYREVMLE |
| | HUMAN | NYSNLVSVGYQLSKPSVISQLEKGEEPW |
| 268 | SUMO1_ | EGEYIKLKVIGQDSSEIHFKVKMTTHLKKLKESYCQRQGVPMNSLRFLFEG |
| | HUMAN | QRIADNHTPKELGMEEEDVIEVYQEQTGG |
| 269 | ZNF12_ | NKSLGPVSFKDVAVDFTQEEWQQLDPEQKITYRDVMLENYSNLVSVGYHII |
| | HUMAN | KPDVISKLEQGEEPWIVEGEFLLQSYPDE |
| 270 | ZN169_ | SPGLLTTRKEALMAFRDVAVAFTQKEWKLLSSAQRTLYREVMLENYSHLV |
| | HUMAN | SLGIAFSKPKLIEQLEQGDEPWREENEHLL |
| 271 | ZN433_ | MFQDSVAFEDVAVTFTQEEWALLDPSQKNLCRDVMQETFRNLASIGKKWK |
| | HUMAN | PQNIYVEYENLRRNLRIVGERLFESKEGHQ |
| 272 | SUMO3_ | ENDHINLKVAGQDGSVVQFKIKRHTPLSKLMKAYCERQGLSMRQIRFRFDG |
| | HUMAN | QPINETDTPAQLEMEDEDTIDVFQQQTGG |
| 273 | ZNF98_ | PGPLGSLEMGVLTFRDVALEFSLEEWQCLDTAQQNLYRNVMLENYRNLVF |
| | HUMAN | VGIAASKPDLITCLEQGKEPWNVKRHEMVT |
| 274 | ZN175_ | LSQKPQVLGPEKQDGSCEASVSFEDVTVDFSREEWQQLDPAQRCLYRDVM |
| | HUMAN | LELYSHLFAVGYHIPNPEVIFRMLKEKEPR |
| 275 | ZN347_ | ALTQGQVTFRDVAIEFSQEEWTCLDPAQRTLYRDVMLENYRNLASLGISCF |
| | HUMAN | DLSIISMLEQGKEPFTLESQVQIAGNPDG |
| 276 | ZNF25_ | NKFQGPVTLKDVIVEFTKEEWKLLTPAQRTLYKDVMLENYSHLVSVGYHV |
| | HUMAN | NKPNAVFKLKQGKEPWILEVEFPHRGFPED |
| 277 | ZN519_ | ELLTFRDVAIEFSPEEWKCLDPAQQNLYRDVMLENYRNLVSLAVYSYYNQ |
| | HUMAN | GILPEQGIQDSFKKATLGRYGSCGLENICL |
| 278 | Z585B_ | SPQKSSALAPEDHGSSYEGSVSFRDVAIDFSREEWRHLDLSQRNLYRDVML |
| | HUMAN | ETYSHLLSVGYQVPKPEVVMLEQGKEPWA |
| 279 | ZIM3_ | NNSQGRVTFEDVTVNFTQGEWQRLNPEQRNLYRDVMLENYSNLVSVGQG |
| | HUMAN | ETTKPDVILRLEQGKEPWLEEEEVLGSGRAE |
| 280 | ZN517_ | AMALPMPGPQEAVVFEDVAVYFTRIEWSCLAPDQQALYRDVMLENYGNL |
| | HUMAN | ASLGFLVAKPALISLLEQGEEPGALILQVAE |
| 281 | ZN846_ | DSSQHLVTFEDVAVDFTQEEWTLLDQAQRDLYRDVMLENYKNLIILAGSEL |
| | HUMAN | FKRSLMSGLEQMEELRTGVTGVLQELDLQ |
| 282 | ZN230_ | TTFKEAVTFKDVAVFFTEEELGLLDPAQRKLYQDVMLENFTNLLSVGHQPF |
| | HUMAN | HPFHFLREEKFWMMETATQREGNSGGKTI |
| 283 | ZNF66_ | GPLQFRDVAIEFSLEEWHCLDMAQRNLYRDVMLENYRNLVFLGIVVSKPD |
| | HUMAN | LITHLEQGKKPSTMQRHEMVANPSVLCSHF |
| 284 | ZFP1_ | NKSQGSVSFTDVTVDFTQEEWEQLDPSQRILYMDVMLENYSNLLSVEVWK |
| | HUMAN | ADDQMERDHRNPDEQARQFLILKNQTPIEE |
| 285 | ZN713_ | EEEEMNDGSQMVRSQESLTFQDVAVDFTREEWDQLYPAQKNLYRDVMLE |
| | HUMAN | NYRNLVALGYQLCKPEVIAQLELEEEWVIER |
| 286 | ZN816_ | EEATKKSKEKEPGMALPQGRLTFRDVAIEFSLEEWKCLNPAQRALYRAVM |
| | HUMAN | LENYRNLEFVDSSLKSMMEFSSTRHSITGE |
| 287 | ZN426_ | EKTPAGRIVADCLTDCYQDSVTFDDVAVDFTQEEWTLLDSTQRSLYSDVM |
| | HUMAN | LENYKNLATVGGQIIKPSLISWLEQEESRT |
| 288 | ZN674_ | AMSQESLTFKDVFVDFTLEEWQQLDSAQKNLYRDVMLENYSHLVSVGHL |
| | HUMAN | VGKPDVIFRLGPGDESWMADGGTPVRTCAGE |
| 289 | ZN627_ | DSVAFEDVAVNFTLEEWALLDPSQKNLYRDVMRETFRNLASVGKQWEDQ |
| | HUMAN | NIEDPFKIPRRNISHIPERLCESKEGGQGEE |
| 290 | ZNF20_ | MFQDSVAFEDVAVSFTQEEWALLDPSQKNLYRDVMQETFKNLTSVGKTW |
| | HUMAN | KVQNIEDEYKNPRRNLSLMREKLCESKESHH |
| 291 | Z587B_ | AVVATLRLSAQGTVTFEDVAVKFTQEEWNLLSEAQRCLYRDVTLENLALM |
| | HUMAN | SSLGCWCGVEDEAAPSKQSIYIQRETQVRT |
| 292 | ZN316_ | EEEEEDEDEDDLLTAGCQELVTFEDVAVYFSLEEWERLEADQRGLYQEVM |
| | HUMAN | QENYGILVSLGYPIPKPDLIFRLEQGEEPW |
| 293 | ZN233_ | TKFQEMVTFKDVAVVFTREELGLLDLAQRKLYQDVMLENFRNLLSVGYQP |
| | HUMAN | FKLDVILQLGKEDKLRMMETEIQGDGCSGH |
| 294 | ZN611_ | EEAAQKRKGKEPGMALPQGRLTFRDVAIEFSLAEWKCLNPSQRALYREVM |
| | HUMAN | LENYRNLEAVDISSKCMMKEVLSTGQGNTE |
| 295 | ZN556_ | DTVVFEDVVVDFTLEEWALLNPAQRKLYRDVMLETFKHLASVDNEAQLK |
| | HUMAN | ASGSISQQDTSGEKLSLKQKIEKFTRKNIWA |
| 296 | ZN234_ | TTFKEGLTFKDVAVVFTEEELGLLDPVQRNLYQDVMLENFRNLLSVGHHPF |
| | HUMAN | KHDVFLLEKEKKLDIMKTATQRKGKSADK |
| 297 | ZN560_ | SALQQEFWKIQTSNGIQMDLVTFDSVAVEFTQEEWTLLDPAQRNLYSDVM |
| | HUMAN | LENYKNLSSVGYQLFKPSLISWLEEEEELS |
| 298 | ZNF77_ | DCVIFEEVAVNFTPEEWALLDHAQRSLYRDVMLETCRNLASLDCYIYVRTS |
| | HUMAN | GSSSQRDVFGNGISNDEEIVKFTGSDSWS |
| 299 | ZN682_ | ELLTFRDVTIEFSLEEWEFLNPAQQSLYRKVMLENYRNLVSLGLTVSKPELI |
| | HUMAN | SRLEQRQEPWNVKRHETIAKPPAMSSHY |
| 300 | ZN614_ | IKTQESLTLEDVAVEFSWEEWQLLDTAQKNLYRDVMVENYNHLVSLGYQT |
| | HUMAN | SKPDVLSKLAHGQEPWTTDAKIQNKNCPGI |
| 301 | ZN785_ | PAHVPGEAGPRRTRESRPGAVSFADVAVYFSPEEWECLRPAQRALYRDVM |
| | HUMAN | RETFGHLGALGFSVPKPAFISWVEGEVEAW |
| 302 | ZN445_ | GCPGDQVTPTRSLTAQLQETMTFKDVEVTFSQDEWGWLDSAQRNLYRDV |
| | HUMAN | MLENYRNMASLVGPFTKPALISWLEAREPWG |
| 303 | ZFP30_ | ARDLVMFRDVAVDFSQEEWECLNSYQRNLYRDVILENYSNLVSLAGCSISK |
| | HUMAN | PDVITLLEQGKEPWMVVRDEKRRWTLDLE |
| 304 | ZN225_ | TTLKEAVTFKDVAVVFTEEELRLLDLAQRKLYREVMLENFRNLLSVGHQSL |
| | HUMAN | HRDTFHFLKEEKFWMMETATQREGNLGGK |
| 305 | ZN551_ | SPPSPRSSMAAVALRDSAQGMTFEDVAIYFSQEEWELLDESQRFLYCDVML |
| | HUMAN | ENFAHVTSLGYCHGMENEAIASEQSVSIQ |
| 306 | ZN610_ | DEEAQKRKAKESGMALPQGRLTFMDVAIEFSQEEWKSLDPGQRALYRDV |
| | HUMAN | MLENYRNLVFLGICLPDLSIISMLKQRREPL |
| 307 | ZN528_ | ALTQGPLKFMDVAIEFSQEEWKCLDPAQRTLYRDVMLENYRNLVSLGICLP |
| | HUMAN | DLSVTSMLEQKRDPWTLQSEEKIANDPDG |
| 308 | ZN284_ | TMFKEAVTFKDVAVVFTEEELGLLDVSQRKLYRDVMLENFRNLLSVGHQL |
| | HUMAN | SHRDTFHFQREEKFWIMETATQREGNSGGK |
| 309 | ZN418_ | QGTVAFEDVAVNFSQEEWSLLSEVQRCLYHDVMLENWVLISSLGCWCGSE |
| | HUMAN | DEEAPSKKSISIQRVSQVSTPGAGVSPKKA |
| 310 | MPP8_ | AEAFGDSEEDGEDVFEVEKILDMKTEGGKVLYKVRWKGYTSDDDTWEPEI |
| | HUMAN | HLEDCKEVLLEFRKKIAENKAKAVRKDIQR |
| 311 | ZN490_ | VLQMQNSEHHGQSIKTQTDSISLEDVAVNFTLEEWALLDPGQRNIYRDVMR |
| | HUMAN | ATFKNLACIGEKWKDQDIEDEHKNQGRNL |
| 312 | ZN805_ | AMALTDPAQVSVTFDDVAVTFTQEEWGQLDLAQRTLYQEVMLENCGLLV |
| | HUMAN | SLGCPVPRPELIYHLEHGQEPWTRKEDLSQG |
| 313 | Z780B_ | VHGSVTFRDVAIDFSQEEWECLQPDQRTLYRDVMLENYSHLISLGSSISKPD |
| | HUMAN | VITLLEQEKEPWIVVSKETSRWYPDLES |
| 314 | ZN763_ | DPVACEDVAVNFTQEEWALLDISQRKLYREVMLETFRNLTSIGKKWKDQNI |
| | HUMAN | EYEYQNPRRNFRSLIEGNVNEIKEDSHCG |
| 315 | ZN285_ | IKFQERVTFKDVAVVFTKEELALLDKAQINLYQDVMLENFRNLMLVRDGIK |
| | HUMAN | NNILNLQAKGLSYLSQEVLHCWQIWKQRI |
| 316 | ZNF85_ | GPLTFRDVAIEFSLKEWQCLDTAQRNLYRNVMLENYRNLVFLGITVSKPDLI |
| | HUMAN | TCLEQGKEAWSMKRHEIMVAKPTVMCSH |
| 317 | ZN223_ | TMSKEAVTFKDVAVVFTEEELGLLDLAQRKLYRDVMLENFRNLLSVGHQP |
| | HUMAN | FHRDTFHFLREEKFWMMDIATQREGNSGGK |
| 318 | ZNF90_ | GPLEFRDVAIEFSLEEWHCLDTAQQNLYRDVMLENYRHLVFLGIVVTKPDL |
| | HUMAN | ITCLEQGKKPFTVKRHEMIAKSPVMCFHF |
| 319 | ZN557_ | GHTEGGELVNELLKSWLKGLVTFEDVAVEFTQEEWALLDPAQRTLYRDV |
| | HUMAN | MLENCRNLASLGNQVDKPRLISQLEQEDKVM |
| 320 | ZN425_ | AEPASVTVTFDDVALYFSEQEWEILEKWQKQMYKQEMKTNYETLDSLGY |
| | HUMAN | AFSKPDLITWMEQGRMLLISEQGCLDKTRRT |
| 321 | ZN229_ | HSQASAISQDREEKIMSQEPLSFKDVAVVFTEEELELLDSTQRQLYQDVMQ |
| | HUMAN | ENFRNLLSVGERNPLGDKNGKDTEYIQDE |
| 322 | ZN606_ | GSLEEGRRATGLPAAQVQEPVTFKDVAVDFTQEEWGQLDLVQRTLYRDV |
| | HUMAN | MLETYGHLLSVGNQIAKPEVISLLEQGEEPW |
| 323 | ZN155_ | TTFKEAVTFKDVAVVFTEEELGLLDPAQRKLYRDVMLENFRNLLSVGHQPF |
| | HUMAN | HQDTCHFLREEKFWMMGTATQREGNSGGK |
| 324 | ZN222_ | AKLYEAVTFKDVAVIFTEEELGLLDPAQRKLYRDVMLENFRNLLSVGGKIQ |
| | HUMAN | TEMETVPEAGTHEEFSCKQIWEQIASDLT |
| 325 | ZN442_ | RSDLFLPDSQTNEERKQYDSVAFEDVAVNFTQEEWALLGPSQKSLYRDVM |
| | HUMAN | WETIRNLDCIGMKWEDTNIEDQHRNPRRSL |
| 326 | ZNF91_ | PGTPGSLEMGLLTFRDVAIEFSPEEWQCLDTAQQNLYRNVMLENYRNLAFL |
| | HUMAN | GIALSKPDLITYLEQGKEPWNMKQHEMVD |
| 327 | ZN135_ | TPGVRVSTDPEQVTFEDVVVGFSQEEWGQLKPAQRTLYRDVMLDTFRLLV |
| | HUMAN | SVGHWLPKPNVISLLEQEAELWAVESRLPQ |
| 328 | ZN778_ | EQTQAAGMVAGWLINCYQDAVTFDDVAVDFTQEEWTLLDPSQRDLYRDV |
| | HUMAN | MLENYENLASVEWRLKTKGPALRQDRSWFRA |
| 329 | RYBP_ | PSEANSIQSANATTKTSETNHTSRPRLKNVDRSTAQQLAVTVGNVTVIITDF |
| | HUMAN | KEKTRSSSTSSSTVTSSAGSEQQNQSSS |
| 330 | ZN534_ | ALTQGQLSFSDVAIEFSQEEWKCLDPGQKALYRDVMLENYRNLVSLGEDN |
| | HUMAN | VRPEACICSGICLPDLSVTSMLEQKRDPWT |
| 331 | ZN586_ | AAAAALRAPAQSSVTFEDVAVNFSLEEWSLLNEAQRCLYRDVMLETLTLIS |
| | HUMAN | SLGCWHGGEDEAAPSKQSTCIHIYKDQGG |
| 332 | ZN567_ | AQGSVSFNDVTVDFTQEEWQHLDHAQKTLYMDVMLENYCHLISVGCHMT |
| | HUMAN | KPDVILKLERGEEPWTSFAGHTCLEENWKAE |
| 333 | ZN440_ | DPVAFKDVAVNFTQEEWALLDISQRKLYREVMLETFRNLTSLGKRWKDQN |
| | HUMAN | IEYEHQNPRRNFRSLIEEKVNEIKDDSHCG |
| 334 | ZN583_ | SKDLVTFGDVAVNFSQEEWEWLNPAQRNLYRKVMLENYRSLVSLGVSVS |
| | HUMAN | KPDVISLLEQGKEPWMVKKEGTRGPCPDWEY |
| 335 | ZN441_ | DSVAFEDVAINFTCEEWALLGPSQKSLYRDVMQETIRNLDCIGMIWQNHDI |
| | HUMAN | EEDQYKDLRRNLRCHMVERACEIKDNSQC |
| 336 | ZNF43_ | GPLTFMDVAIEFCLEEWQCLDIAQQNLYRNVMLENYRNLVFLGIAVSKPDL |
| | HUMAN | ITCLEQEKEPWEPMRRHEMVAKPPVMCSH |
| 337 | CBX5_ | QSNDIARGFERGLEPEKIIGATDSCGDLMFLMKWKDTDEADLVLAKEANV |
| | HUMAN | KCPQIVIAFYEERLTWHAYPEDAENKEKET |
| 338 | ZN589_ | ALPAKDSAWPWEEKPRYLGPVTFEDVAVLFTEAEWKRLSLEQRNLYKEVM |
| | HUMAN | LENLRNLVSLAESKPEVHTCPSCPLAFGSQ |
| 339 | ZNF10_ | DAKSLTAWSRTLVTFKDVFVDFTREEWKLLDTAQQIVYRNVMLENYKNLV |
| | HUMAN | SLGYQLTKPDVILRLEKGEEPWLVEREIHQ |
| 340 | ZN563_ | DAVAFEDVAVNFTQEEWALLGPSQKNLYRYVMQETIRNLDCIRMIWEEQN |
| | HUMAN | TEDQYKNPRRNLRCHMVERFSESKDSSQCG |
| 341 | ZN561_ | EKTKVERMVEDYLASGYQDSVTFDDVAVDFTPEEWALLDTTEKYLYRDV |
| | HUMAN | MLENYMNLASVEWEIQPRTKRSSLQQGFLKN |
| 342 | ZN136_ | DSVAFEDVDVNFTQEEWALLDPSQKNLYRDVMWETMRNLASIGKKWKDQ |
| | HUMAN | NIKDHYKHRGRNLRSHMLERLYQTKDGSQRG |
| 343 | ZN630_ | IESQEPVTFEDVAVDFTQEEWQQLNPAQKTLHRDVMLETYNHLVSVGCSGI |
| | HUMAN | KPDVIFKLEHGKDPWIIESELSRWIYPDR |
| 344 | ZN527_ | AVGLCKAMSQGLVTFRDVALDFSQEEWEWLKPSQKDLYRDVMLENYRNL |
| | HUMAN | VWLGLSISKPNMISLLEQGKEPWMVERKMSQ |
| 345 | ZN333_ | DKVEEEAMAPGLPTACSQEPVTFADVAVVFTPEEWVFLDSTQRSLYRDVM |
| | HUMAN | LENYRNLASVADQLCKPNALSYLEERGEQW |
| 346 | Z324B_ | TFEDVAVYFSQEEWGLLDTAQRALYRHVMLENFTLVTSLGLSTSRPRVVIQ |
| | HUMAN | LERGEEPWVPSGKDMTLARNTYGRLNSGS |
| 347 | ZN786_ | AEPPRLPLTFEDVAIYFSEQEWQDLEAWQKELYKHVMRSNYETLVSLDDG |
| | HUMAN | LPKPELISWIEHGGEPFRKWRESQKSGNII |
| 348 | ZN709_ | DSVVFEDVAVNFTQEEWALLGPSQKKLYRDVMQETFVNLASIGENWEEKN |
| | HUMAN | IEDHKNQGRKLRSHMVERLCERKEGSQFGE |
| 349 | ZN792_ | AAAALRDPAQGCVTFEDVTIYFSQEEWVLLDEAQRLLYCDVMLENFALIAS |
| | HUMAN | LGLISFRSHIVSQLEMGKEPWVPDSVDMT |
| 350 | ZN599_ | AAPALALVSFEDVVVTFTGEEWGHLDLAQRTLYQEVMLETCRLLVSLGHP |
| | HUMAN | VPKPELIYLLEHGQELWTVKRGLSQSTCAG |
| 351 | ZN613_ | IKSQESLTLEDVAVEFTWEEWQLLGPAQKDLYRDVMLENYSNLVSVGYQA |
| | HUMAN | SKPDALFKLEQGEPWTVENEIHSQICPEIK |
| 352 | ZF69B_ | GESLESRVTLGSLTAESQELLTFKDVSVDFTQEEWGQLAPAHRNLYREVML |
| | HUMAN | ENYGNLVSVGCQLSKPGVISQLEKGEEPW |
| 353 | ZN799_ | ASVALEDVAVNFTREEWALLGPCQKNLYKDVMQETIRNLDCVGMKWKD |
| | HUMAN | QNIEDQYRYPRKNLRCRMLERFVESKDGTQCG |
| 354 | ZN569_ | TESQGTVTFKDVAIDFTQEEWKRLDPAQRKLYRNVMLENYNNLITVGYPFT |
| | HUMAN | KPDVIFKLEQEEEPWVMEEEVLRRHWQGE |
| 355 | ZN564_ | DSVASEDVAVNFTLEEWALLDPSQKKLYRDVMRETFRNLACVGKKWEDQ |
| | HUMAN | SIEDWYKNQGRILRNHMEEGLSESKEYDQCG |
| 356 | ZN546_ | EETQGELTSSCGSKTMANVSLAFRDVSIDLSQEEWECLDAVQRDLYKDVM |
| | HUMAN | LENYSNLVALGYTIPKPDVITLLEQEKEPW |
| 357 | ZFP92_ | AAILLTTRPKVPVSFEDVSVYFTKTEWKLLDLRQKVLYKRVMLENYSHLVS |
| | HUMAN | LGFSFSKPHLISQLERGEGPWVADIPRTW |
| 358 | YAF2_ | KDKVEKEKSEKETTSKKNSHKKTRPRLKNVDRSSAQHLEVTVGDLTVIITD |
| | HUMAN | FKEKTKSPPASSAASADQHSQSGSSSDNT |
| 359 | ZN723_ | GPLTFTDVAIKFSLEEWQFLDTAQQNLYRDVMLENYRNLVFLGVGVSKPD |
| | HUMAN | LITCLEQGKEPWNMKRHKMVAKPPVVCSHF |
| 360 | ZNF34_ | RKPNPQAMAALFLSAPPQAEVTFEDVAVYLSREEWGRLGPAQRGLYRDVM |
| | HUMAN | LETYGNLVSLGVGPAGPKPGVISQLERGDE |
| 361 | ZN439_ | LSLSPILLYTCEMFQDPVAFKDVAVNFTQEEWALLDISQKNLYREVMLETF |
| | HUMAN | WNLTSIGKKWKDQNIEYEYQNPRRNFRSV |
| 362 | ZFP57_ | AAGEPRSLLFFQKPVTFEDVAVNFTQEEWDCLDASQRVLYQDVMSETFKN |
| | HUMAN | LTSVARIFLHKPELITKLEQEEEQWRETRV |
| 363 | ZNF19_ | AAMPLKAQYQEMVTFEDVAVHFTKTEWTGLSPAQRALYRSVMLENFGNL |
| | HUMAN | TALGYPVPKPALISLLERGDMAWGLEAQDDP |
| 364 | ZN404_ | ARVPLTFSDVAIDFSQEEWEYLNSDQRDLYRDVMLENYTNLVSLDFNFTTE |
| | HUMAN | SNKLSSEKRNYEVNAYHQETWKRNKTFNL |
| 365 | ZN274_ | ASRLPTAWSCEPVTFEDVTLGFTPEEWGLLDLKQKSLYREVMLENYRNLVS |
| | HUMAN | VEHQLSKPDVVSQLEEAEDFWPVERGIPQ |
| 366 | CBX3_ | SKKKRDAADKPRGFARGLDPERIIGATDSSGELMFLMKWKDSDEADLVLA |
| | HUMAN | KEANMKCPQIVIAFYEERLTWHSCPEDEAQ |
| 367 | ZNF30_ | AHKYVGLQYHGSVTFEDVAIAFSQQEWESLDSSQRGLYRDVMLENYRNLV |
| | HUMAN | SMGHSRSKPHVIALLEQWKEPEVTVRKDGR |
| 368 | ZN250_ | AAARLLPVPAGPQPLSFQAKLTFEDVAVLLSQDEWDRLCPAQRGLYRNVM |
| | HUMAN | METYGNVVSLGLPGSKPDIISQLERGEDPW |
| 369 | ZN570_ | AVGLLKAMYQELVTFRDVAVDFSQEEWDCLDSSQRHLYSNVMLENYRILV |
| | HUMAN | SLGLCFSKPSVILLLEQGKAPWMVKRELTK |
| 370 | ZN675_ | GLLTFRDVAIEFSLEEWQCLDTAQRNLYKNVILENYRNLVFLGIAVSKQDLI |
| | HUMAN | TCLEQEKEPLTVKRHEMVNEPPVMCSHF |
| 371 | ZN695_ | GLLAFRDVALEFSPEEWECLDPAQRSLYRDVMLENYRNLISLGEDSFNMQF |
| | HUMAN | LFHSLAMSKPELIICLEARKEPWNVNTEK |
| 372 | ZN548_ | NLTEGRVVFEDVAIYFSQEEWGHLDEAQRLLYRDVMLENLALLSSLGSWH |
| | HUMAN | GAEDEEAPSQQGFSVGVSEVTASKPCLSSQ |
| 373 | ZN132_ | GPAQHTSWPCGSAVPTLKSMVTFEDVAVYFSQEEWELLDAAQRHLYHSV |
| | HUMAN | MLENLELVTSLGSWHGVEGEGAHPKQNVSVE |
| 374 | ZN738_ | SGYPGAERNLLEYSYFEKGPLTFRDVVIEFSQEEWQCLDTAQQDLYRKVML |
| | HUMAN | ENFRNLVFLGIDVSKPDLITCLEQGKDPW |
| 375 | ZN420_ | ARKLVMFRDVAIDFSQEEWECLDSAQRDLYRDVMLENYSNLVSLDLPSRC |
| | HUMAN | ASKDLSPEKNTYETELSQWEMSDRLENCDL |
| 376 | ZN626_ | GPLQFRDVAIEFSLEEWHCLDTAQRNLYRNVMLENYSNLVFLGITVSKPDLI |
| | HUMAN | TCLEQGRKPLTMKRNEMIAKPSVMCSHF |
| 377 | ZN559_ | VAGWLTNYSQDSVTFEDVAVDFTQEEWTLLDQTQRNLYRDVMLENYKNL |
| | HUMAN | VAVDWESHINTKWSAPQQNFLQGKTSSVVEM |
| 378 | ZN460_ | AAAWMAPAQESVTFEDVAVTFTQEEWGQLDVTQRALYVEVMLETCGLLV |
| | HUMAN | ALGDSTKPETVEPIPSHLALPEEVSLQEQLA |
| 379 | ZN268_ | VLEWLFISQEQPKITKSWGPLSFMDVFVDFTWEEWQLLDPAQKCLYRSVM |
| | HUMAN | LENYSNLVSLGYQHTKPDIIFKLEQGEELC |
| 380 | ZN304_ | AAAVLMDRVQSCVTFEDVFVYFSREEWELLEEAQRFLYRDVMLENFALVA |
| | HUMAN | TLGFWCEAEHEAPSEQSVSVEGVSQVRTAE |
| 381 | ZIM2_ | AGSQFPDFKHLGTFLVFEELVTFEDVLVDFSPEELSSLSAAQRNLYREVMLE |
| | HUMAN | NYRNLVSLGHQFSKPDIISRLEEEESYA |
| 382 | ZN605_ | IQSQISFEDVAVDFTLEEWQLLNPTQKNLYRDVMLENYSNLVFLEVWLDNP |
| | HUMAN | KMWLRDNQDNLKSMERGHKYDVFGKIFNS |
| 383 | ZN844_ | DLVAFEDVAVNFTQEEWSLLDPSQKNLYREVMQETLRNLASIGEKWKDQN |
| | HUMAN | IEDQYKNPRNNLRSLLGERVDENTEENHCG |
| 384 | SUMO5_ | KDEDIKLRVIGQDSSEIHFKVKMTTPLKKLKKSYCQRQGVPVNSLRFLFEGQ |
| | HUMAN | RIADNHTPEELGMEEEDVIEVYQEQIGG |
| 385 | ZN101_ | DSVAFEDVAVNFTQEEWALLSPSQKNLYRDVTLETFRNLASVGIQWKDQDI |
| | HUMAN | ENLYQNLGIKLRSLVERLCGRKEGNEHRE |
| 386 | ZN783_ | RNFWILRLPPGSKGEAPKVPVTFDDVAVYFSELEWGKLEDWQKELYKHVM |
| | HUMAN | RGNYETLVSLDYAISKPDILTRIERGEEPC |
| 387 | ZN417_ | AAAAPRRPTQQGTVTFEDVAVNFSQEEWCLLSEAQRCLYRDVMLENLALIS |
| | HUMAN | SLGCWCGSKDEEAPCKQRISVQRESQSRT |
| 388 | ZN182_ | SGEDSGSFYSWQKAKREQGLVTFEDVAVDFTQEEWQYLNPPQRTLYRDV |
| | HUMAN | MLETYSNLVFVGQQVTKPNLILKLEVEECPA |
| 389 | ZN823_ | DSVAFEDVAVNFTQEEWALLGPSQKSLYRNVMQETIRNLDCIEMKWEDQN |
| | HUMAN | IGDQCQNAKRNLRSHTCEIKDDSQCGETFG |
| 390 | ZN177_ | AAGWLTTWSQNSVTFQEVAVDFSQEEWALLDPAQKNLYKDVMLENFRNL |
| | HUMAN | ASVGYQLCRHSLISKVDQEQLKTDERGILQG |
| 391 | ZN197_ | ENPRNQLMALMLLTAQPQELVMFEEVSVCFTSEEWACLGPIQRALYWDVM |
| | HUMAN | LENYGNVTSLEWETMTENEEVTSKPSSSQR |
| 392 | ZN717_ | LETYNSLVSLQELVSFEEVAVHFTWEEWQDLDDAQRTLYRDVMLETYSSL |
| | HUMAN | VSLGHCITKPEMIFKLEQGAEPWIVEETPN |
| 393 | ZN669_ | RHFRRPEPCREPLASPIQDSVAFEDVAVNFTQEEWALLDSSQKNLYREVMQ |
| | HUMAN | ETCRNLASVGSQWKDQNIEDHFEKPGKDI |
| 394 | ZN256_ | AAAELTAPAQGIVTFEDVAVYFSWKEWGLLDEAQKCLYHDVMLENLTLTT |
| | HUMAN | SLGGSGAGDEEAPYQQSTSPQRVSQVRIPK |
| 395 | ZN251_ | AATFQLPGHQEMPLTFQDVAVYFSQAEGRQLGPQQRALYRDVMLENYGN |
| | HUMAN | VASLGFPVPKPELISQLEQGKELWVLNLLGA |
| 396 | CBX4_ | RSEAGEPPSSLQVKPETPASAAVAVAAAAAPTTTAEKPPAEAQDEPAESLSE |
| | HUMAN | FKPFFGNIIITDVTANCLTVTFKEYVTV |
| 397 | PCGF2_ | HRTTRIKITELNPHLMCALCGGYFIDATTIVECLHSFCKTCIVRYLETNKYCP |
| | HUMAN | MCDVQVHKTRPLLSIRSDKTLQDIVYK |
| 398 | CDY2_ | ASQEFEVEAIVDKRQDKNGNTQYLVRWKGYDKQDDTWEPEQHLMNCEKC |
| | HUMAN | VHDFNRRQTEKQKKLTWTTTSRIFSNNARRR |
| 399 | CDYL2_ | ASGDLYEVERIVDKRKNKKGKWEYLIRWKGYGSTEDTWEPEHHLLHCEEF |
| | HUMAN | IDEFNGLHMSKDKRIKSGKQSSTSKLLRDS |
| 400 | HERC2_ | TLIRKADLENHNKDGGFWTVIDGKVYDIKDFQTQSLTGNSILAQFAGEDPV |
| | HUMAN | VALEAALQFEDTRESMHAFCVGQYLEPDQ |
| 401 | ZN562_ | EKTKIGTMVEDHRSNSYQDSVTFDDVAVEFTPEEWALLDTTQKYLYRDVM |
| | HUMAN | LENYMNLASVDFFFCLTSEWEIQPRTKRSS |
| 402 | ZN461_ | AHELVMFRDVAIDVSQEEWECLNPAQRNLYKEVMLENYSNLVSLGLSVSK |
| | HUMAN | PAVISSLEQGKEPWMVVREETGRWCPGTWK |
| 403 | Z324A_ | AFEDVAVYFSQEEWGLLDTAQRALYRRVMLDNFALVASLGLSTSRPRVVI |
| | HUMAN | QLERGEEPWVPSGTDTTLSRTTYRRRNPGS |
| 404 | ZN766_ | AQLRRGHLTFRDVAIEFSQEEWKCLDPVQKALYRDVMLENYRNLVSLGICL |
| | HUMAN | PDLSIISMMKQRTEPWTVENEMKVAKNPD |
| 405 | ID2_ | SDHSLGISRSKTPVDDPMSLLYNMNDCYSKLKELVPSIPQNKKVSKMEILQH |
| | HUMAN | VIDYILDLQIALDSHPTIVSLHHQRPGQ |
| 406 | TOX_ | KDPNEPQKPVSAYALFFRDTQAAIKGQNPNATFGEVSKIVASMWDGLGEE |
| | HUMAN | QKQVYKKKTEAAKKEYLKQLAAYRASLVSK |
| 407 | ZN274_ | QEEKQEDAAICPVTVLPEEPVTFQDVAVDFSREEWGLLGPTQRTEYRDVML |
| | HUMAN | ETFGHLVSVGWETTLENKELAPNSDIPEE |
| 408 | SCMH1_ | DASRLSGRDPSSWTVEDVMQFVREADPQLGPHADLFRKHEIDGKALLLLRS |
| | HUMAN | DMMMKYMGLKLGPALKLSYHIDRLKQGKF |
| 409 | ZN214_ | AVTFEDVTIIFTWEEWKFLDSSQKRLYREVMWENYTNVMSVENWNESYKS |
| | HUMAN | QEEKFRYLEYENFSYWQGWWNAGAQMYENQ |
| 410 | CBX7_ | ELSAIGEQVFAVESIRKKRVRKGKVEYLVKWKGWPPKYSTWEPEEHILDPR |
| | HUMAN | LVMAYEEKEERDRASGYRKRGPKPKRLLL |
| 411 | ID1_ | GGAGARLPALLDEQQVNVLLYDMNGCYSRLKELVPTLPQNRKVSKVEILQ |
| | HUMAN | HVIDYIRDLQLELNSESEVGTPGGRGLPVR |
| 412 | CREM_ | VVMAASPGSLHSPQQLAEEATRKRELRLMKNREAAKECRRRKKEYVKCLE |
| | HUMAN | SRVAVLEVQNKKLIEELETLKDICSPKTDY |
| 413 | SCX_ | GGGPGGRPGREPRQRHTANARERDRTNSVNTAFTALRTLIPTEPADRKLSKI |
| | HUMAN | ETLRLASSYISHLGNVLLAGEACGDGQP |
| 414 | ASCL1_ | SGFGYSLPQQQPAAVARRNERERNRVKLVNLGFATLREHVPNGAANKKMS |
| | HUMAN | KVETLRSAVEYIRALQQLLDEHDAVSAAFQ |
| 415 | ZN764_ | APLPPRDPNGAGPEWREPGAVSFADVAVYFCREEWGCLRPAQRALYRDV |
| | HUMAN | MRETYGHLSALGIGGNKPALISWVEEEAELW |
| 416 | SCML2_ | KQGFSKDPSTWSVDEVIQFMKHTDPQISGPLADLFRQHEIDGKALFLLKSDV |
| | HUMAN | MMKYMGLKLGPALKLCYYIEKLKEGKYS |
| 417 | TWST1_ | SGGGSPQSYEELQTQRVMANVRERQRTQSLNEAFAALRKIIPTLPSDKLSKI |
| | HUMAN | QTLKLAARYIDFLYQVLQSDELDSKMAS |
| 418 | CREB1_ | IAPGVVMASSPALPTQPAEEAARKREVRLMKNREAARECRRKKKEYVKCL |
| | HUMAN | ENRVAVLENQNKTLIEELKALKDLYCHKSD |
| 419 | TERF1_ | SRIPVSKSQPVTPEKHRARKRQAWLWEEDKNLRSGVRKYGEGNWSKILLH |
| | HUMAN | YKFNNRTSVMLKDRWRTMKKLKLISSDSED |
| 420 | ID3_ | SLAIARGRGKGPAAEEPLSLLDDMNHCYSRLRELVPGVPRGTQLSQVEILQR |
| | HUMAN | VIDYILDLQVVLAEPAPGPPDGPHLPIQ |
| 421 | CBX8_ | GSGPPSSGGGLYRDMGAQGGRPSLIARIPVARILGDPEEESWSPSLTNLEKV |
| | HUMAN | VVTDVTSNFLTVTIKESNTDQGFFKEKR |
| 422 | CBX4_ | ELPAVGEHVFAVESIEKKRIRKGRVEYLVKWRGWSPKYNTWEPEENILDPR |
| | HUMAN | LLIAFQNRERQEQLMGYRKRGPKPKPLVV |
| 423 | GSX1_ | VDSSSNQLPSSKRMRTAFTSTQLLELEREFASNMYLSRLRRIEIATYLNLSEK |
| | HUMAN | QVKIWFQNRRVKHKKEGKGSNHRGGGG |
| 424 | NKX22_ | TPGGGGDAGKKRKRRVLFSKAQTYELERRFRQQRYLSAPEREHLASLIRLT |
| | HUMAN | PTQVKIWFQNHRYKMKRARAEKGMEVTPL |
| 425 | ATF1_ | QTVVMTSPVTLTSQTTKTDDPQLKREIRLMKNREAARECRRKKKEYVKCL |
| | HUMAN | ENRVAVLENQNKTLIEELKTLKDLYSNKSV |
| 426 | TWST2_ | KGSPSAQSFEELQSQRILANVRERQRTQSLNEAFAALRKIIPTLPSDKLSKIQT |
| | HUMAN | LKLAARYIDFLYQVLQSDEMDNKMTS |
| 427 | ZNF17_ | NLTEDYMVFEDVAIHFSQEEWGILNDVQRHLHSDVMLENFALLSSVGCWH |
| | HUMAN | GAKDEEAPSKQCVSVGVSQVTTLKPALSTQ |
| 428 | TOX3_ | KDPNEPQKPVSAYALFFRDTQAAIKGQNPNATFGEVSKIVASMWDSLGEEQ |
| | HUMAN | KQVYKRKTEAAKKEYLKALAAYRASLVSK |
| 429 | TOX4_ | KDPNEPQKPVSAYALFFRDTQAAIKGQNPNATFGEVSKIVASMWDSLGEEQ |
| | HUMAN | KQVYKRKTEAAKKEYLKALAAYKDNQECQ |
| 430 | ZMYM3_ | LDGSTWDFCSEDCKSKYLLWYCKAARCHACKRQGKLLETIHWRGQIRHFC |
| | HUMAN | NQQCLLRFYSQQNQPNLDTQSGPESLLNSQ |
| 431 | I2BP1_ | ASVQASRRQWCYLCDLPKMPWAMVWDFSEAVCRGCVNFEGADRIELLID |
| | HUMAN | AARQLKRSHVLPEGRSPGPPALKHPATKDLA |
| 432 | RHXF1_ | MEGPQPENMQPRTRRTKFTLLQVEELESVFRHTQYPDVPTRRELAENLGVT |
| | HUMAN | EDKVRVWFKNKRARCRRHQRELMLANELR |
| 433 | SSX2_ | PKIMPKKPAEEGNDSEEVPEASGPQNDGKELCPPGKPTTSEKIHERSGPKRG |
| | HUMAN | EHAWTHRLRERKQLVIYEEISDPEEDDE |
| 434 | I2BPL_ | SAAQVSSSRRQSCYLCDLPRMPWAMIWDFSEPVCRGCVNYEGADRIEFVIE |
| | HUMAN | TARQLKRAHGCFQDGRSPGPPPPVGVKTV |
| 435 | ZN680_ | PGPPGSLEMGPLTFRDVAIEFSLEEWQCLDTAQRNLYRKVMFENYRNLVFL |
| | HUMAN | GIAVSKPHLITCLEQGKEPWNRKRQEMVA |
| 436 | CBX1_ | NKKKVEEVLEEEEEEYVVEKVLDRRVVKGKVEYLLKWKGFSDEDNTWEP |
| | HUMAN | EENLDCPDLIAEFLQSQKTAHETDKSEGGKR |
| 437 | TRI68_ | LANVVEKVRLLRLHPGMGLKGDLCERHGEKLKMFCKEDVLIMCEACSQSP |
| | HUMAN | EHEAHSVVPMEDVAWEYKWELHEALEHLKK |
| 438 | HXA13_ | VVSHPSDASSYRRGRKKRVPYTKVQLKELEREYATNKFITKDKRRRISATT |
| | HUMAN | NLSERQVTIWFQNRRVKEKKVINKLKTTS |
| 439 | PHC3_ | ENSDLLPVAQTEPSIWTVDDVWAFIHSLPGCQDIADEFRAQEIDGQALLLLK |
| | HUMAN | EDHLMSAMNIKLGPALKICARINSLKES |
| 440 | TCF24_ | AGPGGGSRSGSGRPAAANAARERSRVQTLRHAFLELQRTLPSVPPDTKLSK |
| | HUMAN | LDVLLLATTYIAHLTRSLQDDAEAPADAG |
| 441 | CBX3_ | QNGKSKKVEEAEPEEFVVEKVLDRRVVNGKVEYFLKWKGFTDADNTWEP |
| | HUMAN | EENLDCPELIEAFLNSQKAGKEKDGTKRKSL |
| 442 | HXB13_ | QHPPDACAFRRGRKKRIPYSKGQLRELEREYAANKFITKDKRRKISAATSLS |
| | HUMAN | ERQITIWFQNRRVKEKKVLAKVKNSATP |
| 443 | HEY1_ | SMSPTTSSQILARKRRRGIIEKRRRDRINNSLSELRRLVPSAFEKQGSAKLEK |
| | HUMAN | AEILQMTVDHLKMLHTAGGKGYFDAHA |
| 444 | PHC2_ | LVGMGHHFLPSEPTKWNVEDVYEFIRSLPGCQEIAEEFRAQEIDGQALLLLK |
| | HUMAN | EDHLMSAMNIKLGPALKIYARISMLKDS |
| 445 | ZNF81_ | PANEDAPQPGEHGSACEVSVSFEDVTVDFSREEWQQLDSTQRRLYQDVML |
| | HUMAN | ENYSHLLSVGFEVPKPEVIFKLEQGEGPWT |
| 446 | FIGLA_ | GYSSTENLQLVLERRRVANAKERERIKNLNRGFARLKALVPFLPQSRKPSK |
| | HUMAN | VDILKGATEYIQVLSDLLEGAKDSKKQDP |
| 447 | SAM11_ | EEAPAPEDVTKWTVDDVCSFVGGLSGCGEYTRVFREQGIDGETLPLLTEEH |
| | HUMAN | LLTNMGLKLGPALKIRAQVARRLGRVFYV |
| 448 | KMT2B_ | GGTLAHTPRRSLPSHHGKKMRMARCGHCRGCLRVQDCGSCVNCLDKPKF |
| | HUMAN | GGPNTKKQCCVYRKCDKIEARKMERLAKKGR |
| 449 | HEY2_ | LNSPTTTSQIMARKKRRGIIEKRRRDRINNSLSELRRLVPTAFEKQGSAKLEK |
| | HUMAN | AEILQMTVDHLKMLQATGGKGYFDAHA |
| 450 | JDP2_ | QPVKSELDEEEERRKRRREKNKVAAARCRNKKKERTEFLQRESERLELMN |
| | HUMAN | AELKTQIEELKQERQQLILMLNRHRPTCIV |
| 451 | HXC13_ | LQPEVSSYRRGRKKRVPYTKVQLKELEKEYAASKFITKEKRRRISATTNLSE |
| | HUMAN | RQVTIWFQNRRVKEKKVVSKSKAPHLHS |
| 452 | ASCL4_ | LPVPLDSAFEPAFLRKRNERERQRVRCVNEGYARLRDHLPRELADKRLSKV |
| | HUMAN | ETLRAAIDYIKHLQELLERQAWGLEGAAG |
| 453 | HHEX_ | SPFLQRPLHKRKGGQVRFSNDQTIELEKKFETQKYLSPPERKRLAKMLQLSE |
| | HUMAN | RQVKTWFQNRRAKWRRLKQENPQSNKKE |
| 454 | HERC2_ | IAIATGSLHCVCCTEDGEVYTWGDNDEGQLGDGTTNAIQRPRLVAALQGK |
| | HUMAN | KVNRVACGSAHTLAWSTSKPASAGKLPAQV |
| 455 | GSX2_ | GGSDASQVPNGKRMRTAFTSTQLLELEREFSSNMYLSRLRRIEIATYLNLSE |
| | HUMAN | KQVKIWFQNRRVKHKKEGKGTQRNSHAG |
| 456 | BIN1_ | RLDLPPGFMFKVQAQHDYTATDTDELQLKAGDVVLVIPFQNPEEQDEGWL |
| | HUMAN | [sequence omitted] |
| 457 | ETV7_ | GICKLPGRLRIQPALWSREDVLHWLRWAEQEYSLPCTAEHGFEMNGRALCI |
| | HUMAN | LTKDDFRHRAPSSGDVLYELLQYIKTQRR |
| 458 | ASCL3_ | PNYRGCEYSYGPAFTRKRNERERQRVKCVNEGYAQLRHHLPEEYLEKRLS |
| | HUMAN | KVETLRAAIKYINYLQSLLYPDKAETKNNP |
| 459 | PHC1_ | LHGINPVFLSSNPSRWSVEEVYEFIASLQGCQEIAEEFRSQEIDGQALLLLKE |
| | HUMAN | EHLMSAMNIKLGPALKICAKINVLKET |
| 460 | OTP_ | QAGQQQGQQKQKRHRTRFTPAQLNELERSFAKTHYPDIFMREELALRIGLT |
| | AHUMANN | ESRVQVWFQNRRAKWKKRKKTTNVFRAPG |
| 461 | I2BP2_ | AAAVAVAAASRRQSCYLCDLPRMPWAMIWDFTEPVCRGCVNYEGADRVE |
| | HUMAN | FVIETARQLKRAHGCFPEGRSPPGAAASAAA |
| 462 | VGLL2_ | FSSQTPASIKEEEGSPEKERPPEAEYINSRCVLFTYFQGDISSVVDEHFSRALS |
| | HUMAN | QPSSYSPSCTSSKAPRSSGPWRDCSF |
| 463 | HXA11_ | DKAGGSSGQRTRKKRCPYTKYQIRELEREFFFSVYINKEKRLQLSRMLNLT |
| | HUMAN | DRQVKIWFQNRRMKEKKINRDRLQYYSAN |
| 464 | PDLI4_ | GAPLSGLQGLPECTRCGHGIVGTIVKARDKLYHPECFMCSDCGLNLKQRGY |
| | HUMAN | FFLDERLYCESHAKARVKPPEGYDVVAVY |
| 465 | ASCL2_ | RRPATAETGGGAAAVARRNERERNRVKLVNLGFQALRQHVPHGGASKKL |
| | HUMAN | SKVETLRSAVEYIRALQRLLAEHDAVRNALA |
| 466 | CDX4_ | TVQVTGKTRTKEKYRVVYTDHQRLELEKEFHCNRYITIQRKSELAVNLGLS |
| | HUMAN | ERQVKIWFQNRRAKERKMIKKKISQFENS |
| 467 | ZN860_ | EEAAQKRKEKEPGMALPQGHLTFRDVAIEFSLEEWKCLDPTQRALYRAMM |
| | HUMAN | LENYRNLHSVDISSKCMMKKFSSTAQGNTE |
| 468 | LMBL4_ | DIRASQVARWTVDEVAEFVQSLLGCEEHAKCFKKEQIDGKAFLLLTQTDIV |
| | HUMAN | KVMKIKLGPALKIYNSILMFRHSQELPEE |
| 469 | PDIP3_ | LSPLEGTKMTVNNLHPRVTEEDIVELFCVCGALKRARLVHPGVAEVVFVKK |
| | HUMAN | DDAITAYKKYNNRCLDGQPMKCNLHMNGN |
| 470 | NKX25_ | DNAERPRARRRRKPRVLFSQAQVYELERRFKQQRYLSAPERDQLASVLKLT |
| | HUMAN | STQVKIWFQNRRYKCKRQRQDQTLELVGL |
| 471 | CEBPB_ | SQVKSKAKKTVDKHSDEYKIRRERNNIAVRKSRDKAKMRNLETQHKVLEL |
| | HUMAN | TAENERLQKKVEQLSRELSTLRNLFKQLPE |
| 472 | ISL1_ | KRDYIRLYGIKCAKCSIGFSKNDFVMRARSKVYHIECFRCVACSRQLIPGDE |
| | HUMAN | FALREDGLFCRADHDVVERASLGAGDPL |
| 473 | CDX2_ | SLGSQVKTRTKDKYRVVYTDHQRLELEKEFHYSRYITIRRKAELAATLGLS |
| | HUMAN | ERQVKIWFQNRRAKERKINKKKLQQQQQQ |
| 474 | PROP1_ | QGGQRGRPHSRRRHRTTFSPVQLEQLESAFGRNQYPDIWARESLARDTGLS |
| | HUMAN | EARIQVWFQNRRAKQRKQERSLLQPLAHL |
| 475 | SIN3B_ | DALTYLDQVKIRFGSDPATYNGFLEIMKEFKSQSIDTPGVIRRVSQLFHEHPD |
| | HUMAN | LIVGFNAFLPLGYRIDIPKNGKLNIQS |
| 476 | SMBT1_ | RLHLDSNPLKWSVADVVRFIRSTDCAPLARIFLDQEIDGQALLLLTLPTVQE |
| | HUMAN | CMDLKLGPAIKLCHHIERIKFAFYEQFA |
| 477 | HXC11_ | AKGAAPNAPRTRKKRCPYSKFQIRELEREFFFNVYINKEKRLQLSRMLNLTD |
| | HUMAN | RQVKIWFQNRRMKEKKLSRDRLQYFSGN |
| 478 | HXC10_ | TTGNWLTAKSGRKKRCPYTKHQTLELEKEFLFNMYLTRERRLEISKTINLTD |
| | HUMAN | RQVKIWFQNRRMKLKKMNRENRIRELTS |
| 479 | PRS6A_ | YLVSNVIELLDVDPNDQEEDGANIDLDSQRKGKCAVIKTSTRQTYFLPVIGL |
| | HUMAN | VDAEKLKPGDLVGVNKDSYLILETLPTE |
| 480 | VSX1_ | KASPTLGKRKKRRHRTVFTAHQLEELEKAFSEAHYPDVYAREMLAVKTEL |
| | HUMAN | PEDRIQVWFQNRRAKWRKREKRWGGSSVMA |
| 481 | NKX23_ | EESERPKPRSRRKPRVLFSQAQVFELERRFKQQRYLSAPEREHLASSLKLTST |
| | HUMAN | QVKIWFQNRRYKCKRQRQDKSLELGAH |
| 482 | MTG16_ | VVPGSRQEEVIDHKLTEREWAEEWKHLNNLLNCIMDMVEKTRRSLTVLRR |
| | HUMAN | CQEADREELNHWARRYSDAEDTKKGPAPAA |
| 483 | HMX3_ | ESPEKKPACRKKKTRTVFSRSQVFQLESTFDMKRYLSSSERAGLAASLHLTE |
| | HUMAN | TQVKIWFQNRRNKWKRQLAAELEAANLS |
| 484 | HMX1_ | RGGVGVGGGRKKKTRTVFSRSQVFQLESTFDLKRYLSSAERAGLAASLQLT |
| | HUMAN | ETQVKIWFQNRRNKWKRQLAAELEAASLS |
| 485 | KIF22_ | ELLAHGRQKILDLLNEGSARDLRSLQRIGPKKAQLIVGWRELHGPFSQVEDL |
| | HUMAN | ERVEGITGKQMESFLKANILGLAAGQRC |
| 486 | CSTF2_ | ESPYGETISPEDAPESISKAVASLPPEQMFELMKQMKLCVQNSPQEARNMLL |
| | HUMAN | QNPQLAYALLQAQVVMRIVDPEIALKIL |
| 487 | CEBPE_ | AGPLHKGKKAVNKDSLEYRLRRERNNIAVRKSRDKAKRRILETQQKVLEY |
| | HUMAN | MAENERLRSRVEQLTQELDTLRNLFRQIPE |
| 488 | DLX2_ | IRIVNGKPKKVRKPRTIYSSFQLAALQRRFQKTQYLALPERAELAASLGLTQ |
| | HUMAN | TQVKIWFQNRRSKFKKMWKSGEIPSEQH |
| 489 | ZMYM3_ | TVYQFCSPSCWTKFQRTSPEGGIHLSCHYCHSLFSGKPEVLDWQDQVFQFC |
| | HUMAN | CRDCCEDFKRLRGVVSQCEHCRQEKLLHE |
| 490 | PPARG_ | TMVDTEMPFWPTNFGISSVDLSVMEDHSHSFDIKPFTTVDFSSISTPHYEDIP |
| | HUMAN | FTRTDPVVADYKYDLKLQEYQSAIKVE |
| 491 | PRIC1_ | GRHHAELLKPRCSACDEIIFADECTEAEGRHWHMKHFCCLECETVLGGQRY |
| | HUMAN | IMKDGRPFCCGCFESLYAEYCETCGEHIG |
| 492 | UNC4_ | DPDKESPGCKRRRTRTNFTGWQLEELEKAFNESHYPDVFMREALALRLDL |
| | HUMAN | VESRVQVWFQNRRAKWRKKENTKKGPGRPA |
| 493 | BARX2_ | TEQPTPRQKKPRRSRTIFTELQLMGLEKKFQKQKYLSTPDRLDLAQSLGLTQ |
| | HUMAN | LQVKTWYQNRRMKWKKMVLKGGQEAPTK |
| 494 | ALX3_ | SMELAKNKSKKRRNRTTFSTFQLEELEKVFQKTHYPDVYAREQLALRTDLT |
| | HUMAN | EARVQVWFQNRRAKWRKRERYGKIQEGRN |
| 495 | TCF15_ | GGGGGAGPVVVVRQRQAANARERDRTQSVNTAFTALRTLIPTEPVDRKLS |
| | HUMAN | KIETVRLASSYIAHLANVLLLGDSADDGQP |
| 496 | TERA_ | IDDTVEGITGNLFEVYLKPYFLEAYRPIRKGDIFLVRGGMRAVEFKVVETDP |
| | HUMAN | SPYCIVAPDTVIHCEGEPIKREDEEESL |
| 497 | VSX2_ | SALNQTKKRKKRRHRTIFTSYQLEELEKAFNEAHYPDVYAREMLAMKTEL |
| | HUMAN | PEDRIQVWFQNRRAKWRKREKCWGRSSVMA |
| 498 | HXD12_ | DGLPWGAAPGRARKKRKPYTKQQIAELENEFLVNEFINRQKRKELSNRLNL |
| | HUMAN | SDQQVKIWFQNRRMKKKRVVLREQALALY |
| 499 | CDX1_ | GGGGSGKTRTKDKYRVVYTDHQRLELEKEFHYSRYITIRRKSELAANLGLT |
| | HUMAN | ERQVKIWFQNRRAKERKVNKKKQQQQQPP |
| 500 | TCF23_ | TRAGGLALGRSEASPENAARERSRVRTLRQAFLALQAALPAVPPDTKLSKL |
| | HUMAN | DVLVLAASYIAHLTRTLGHELPGPAWPPF |
| 501 | ALX1_ | KCDSNVSSSKKRRHRTTFTSLQLEELEKVFQKTHYPDVYVREQLALRTELT |
| | HUMAN | EARVQVWFQNRRAKWRKRERYGQIQQAKS |
| 502 | HXA10_ | NAANWLTAKSGRKKRCPYTKHQTLELEKEFLFNMYLTRERRLEISRSVHLT |
| | HUMAN | DRQVKIWFQNRRMKLKKMNRENRIRELTA |
| 503 | RX_ | LSEEEQPKKKHRRNRTTFTTYQLHELERAFEKSHYPDVYSREELAGKVNLP |
| | HUMAN | EVRVQVWFQNRRAKWRRQEKLEVSSMKLQ |
| 504 | CXXC5_ | HMAGLAEYPMQGELASAISSGKKKRKRCGMCAPCRRRINCEQCSSCRNRK |
| | HUMAN | TGHQICKFRKCEELKKKPSAALEKVMLPTG |
| 505 | SCML1_ | SITKHPSTWSVEAVVLFLKQTDPLALCPLVDLFRSHEIDGKALLLLTSDVLL |
| | HUMAN | KHLGVKLGTAVKLCYYIDRLKQGKCFEN |
| 506 | NFIL3_ | ACRRKREFIPDEKKDAMYWEKRRKNNEAAKRSREKRRLNDLVLENKLIAL |
| | HUMAN | GEENATLKAELLSLKLKFGLISSTAYAQEI |
| 507 | DLX6_ | EIRFNGKGKKIRKPRTIYSSLQLQALNHRFQQTQYLALPERAELAASLGLTQ |
| | HUMAN | TQVKIWFQNKRSKFKKLLKQGSNPHESD |
| 508 | MTG8_ | GLHGTRQEEMIDHRLTDREWAEEWKHLDHLLNCIMDMVEKTRRSLTVLRR |
| | HUMAN | CQEADREELNYWIRRYSDAEDLKKGGGSSS |
| 509 | CBX8_ | ELSAVGERVFAAEALLKRRIRKGRMEYLVKWKGWSQKYSTWEPEENILDA |
| | HUMAN | RLLAAFEEREREMELYGPKKRGPKPKTFLL |
| 510 | CEBPD_ | AREKSAGKRGPDRGSPEYRQRRERNNIAVRKSRDKAKRRNQEMQQKLVEL |
| | HUMAN | SAENEKLHQRVEQLTRDLAGLRQFFKQLPS |
| 511 | SEC13_ | SGGCDNLIKLWKEEEDGQWKEEQKLEAHSDWVRDVAWAPSIGLPTSTIAS |
| | HUMAN | CSQDGRVFIWTCDDASSNTWSPKLLHKFND |
| 512 | FIP1_ | VKGVDLDAPGSINGVPLLEVDLDSFEDKPWRKPGADLSDYFNYGFNEDTW |
| | HUMAN | KAYCEKQKRIRMGLEVIPVTSTTNKITAED |
| 513 | ALX4_ | KADSESNKGKKRRNRTTFTSYQLEELEKVFQKTHYPDVYAREQLAMRTDL |
| | HUMAN | TEARVQVWFQNRRAKWRKRERFGQMQQVRT |
| 514 | LHX3_ | TAKQREAEATAKRPRTTITAKQLETLKSAYNTSPKPARHVREQLSSETGLD |
| | HUMAN | MRVVQVWFQNRRAKEKRLKKDAGRQRWGQ |
| 515 | PRIC2_ | GRHHAECLKPRCAACDEIIFADECTEAEGRHWHMKHFCCFECETVLGGQR |
| | HUMAN | YIMKEGRPYCCHCFESLYAEYCDTCAQHIG |
| 516 | MAGI3_ | IIGGDRPDEFLQVKNVLKDGPAAQDGKIAPGDVIVDINGNCVLGHTHADVV |
| | HUMAN | QMFQLVPVNQYVNLTLCRGYPLPDDSEDP |
| 517 | NELL1_ | CCPECDTRVTSQCLDQNGHKLYRSGDNWTHSCQQCRCLEGEVDCWPLTCP |
| | HUMAN | NLSCEYTAILEGECCPRCVSDPCLADNITY |
| 518 | PRRX1_ | LNSEEKKKRKQRRNRTTFNSSQLQALERVFERTHYPDAFVREDLARRVNLT |
| | HUMAN | EARVQVWFQNRRAKFRRNERAMLANKNAS |
| 519 | MTG8R_ | GLNGGYQDELVDHRLTEREWADEWKHLDHALNCIMEMVEKTRRSMAVL |
| | HUMAN | RRCQESDREELNYWKRRYNENTELRKTGTELV |
| 520 | RAX2_ | GPGEEAPKKKHRRNRTTFTTYQLHQLERAFEASHYPDVYSREELAAKVHLP |
| | HUMAN | EVRVQVWFQNRRAKWRRQERLESGSGAVA |
| 521 | DLX3_ | VRMVNGKPKKVRKPRTIYSSYQLAALQRRFQKAQYLALPERAELAAQLGL |
| | HUMAN | TQTQVKIWFQNRRSKFKKLYKNGEVPLEHS |
| 522 | DLX1_ | EVRFNGKGKKIRKPRTIYSSLQLQALNRRFQQTQYLALPERAELAASLGLTQ |
| | HUMAN | TQVKIWFQNKRSKFKKLMKQGGAALEGS |
| 523 | NKX26_ | GRSEQPKARQRRKPRVLFSQAQVLALERRFKQQRYLSAPEREHLASALQLT |
| | HUMAN | STQVKIWFQNRRYKCKRQRQDKSLELAGH |
| 524 | NAB1_ | LPRTLGELQLYRILQKANLLSYFDAFIQQGGDDVQQLCEAGEEEFLEIMALV |
| | HUMAN | GMASKPLHVRRLQKALRDWVTNPGLFNQ |
| 525 | SAMD7_ | NLSLDEDIQKWTVDDVHSFIRSLPGCSDYAQVFKDHAIDGETLPLLTEEHLR |
| | HUMAN | GTMGLKLGPALKIQSQVSQHVGSMFYKK |
| 526 | PITX3_ | SPEDGSLKKKQRRQRTHFTSQQLQELEATFQRNRYPDMSTREEIAVWTNLT |
| | HUMAN | EARVRVWFKNRRAKWRKRERSQQAELCKG |
| 527 | WDR5_ | SNLLVSASDDKTLKIWDVSSGKCLKTLKGHSNYVFCCNFNPQSNLIVSGSFD |
| | HUMAN | ESVRIWDVKTGKCLKTLPAHSDPVSAVH |
| 528 | MEOX2_ | GNYKSEVNSKPRKERTAFTKEQIRELEAEFAHHNYLTRLRRYEIAVNLDLTE |
| | HUMAN | RQVKVWFQNRRMKWKRVKGGQQGAAARE |
| 529 | NAB2_ | LPRTLGELQLYRVLQRANLLSYYETFIQQGGDDVQQLCEAGEEEFLEIMAL |
| | HUMAN | VGMATKPLHVRRLQKALREWATNPGLFSQ |
| 530 | DHX8_ | PEEPTIGDIYNGKVTSIMQFGCFVQLEGLRKRWEGLVHISELRREGRVANVA |
| | HUMAN | DVVSKGQRVKVKVLSFTGTKTSLSMKDV |
| 531 | FOXA2_ | YAFNHPFSINNLMSSEQQHHHSHHHHQPHKMDLKAYEQVMHYPGYGSPM |
| | HUMAN | PGSLAMGPVTNKTGLDASPLAADTSYYQGVY |
| 532 | CBX6_ | TAAAGPAPPTAPEPAGASSEPEAGDWRPEMSPCSNVVVTDVTSNLLTVTIK |
| | HUMAN | EFCNPEDFEKVAAGVAGAAGGGGSIGASK |
| 533 | EMX2_ | FLLHNALARKPKRIRTAFSPSQLLRLEHAFEKNHYVVGAERKQLAHSLSLTE |
| | HUMAN | TQVKVWFQNRRTKFKRQKLEEEGSDSQQ |
| 534 | CPSF6_ | KRIALYIGNLTWWTTDEDLTEAVHSLGVNDILEIKFFENRANGQSKGFALV |
| | HUMAN | GVGSEASSKKLMDLLPKRELHGQNPVVTP |
| 535 | HXC12_ | SGAPWYPINSRSRKKRKPYSKLQLAELEGEFLVNEFITRQRRRELSDRLNLS |
| | HUMAN | DQQVKIWFQNRRMKKKRLLLREQALSFF |
| 536 | KDM4B_ | SDNLYPESITSRDCVQLGPPSEGELVELRWTDGNLYKAKFISSVTSHIYQVEF |
| | HUMAN | EDGSQLTVKRGDIFTLEEELPKRVRSR |
| 537 | LMBL3_ | GIPASKVSKWSTDEVSEFIQSLPGCEEHGKVFKDEQIDGEAFLLMTQTDIVKI |
| | HUMAN | MSIKLGPALKIFNSILMFKAAEKNSHN |
| 538 | PHX2A_ | EPSGLHEKRKQRRIRTTFTSAQLKELERVFAETHYPDIYTREELALKIDLTEA |
| | HUMAN | RVQVWFQNRRAKFRKQERAASAKGAAG |
| 539 | EMX1_ | LLLHGPFARKPKRIRTAFSPSQLLRLERAFEKNHYVVGAERKQLAGSLSLSE |
| | HUMAN | TQVKVWFQNRRTKYKRQKLEEEGPESEQ |
| 540 | NC2B_ | SSGNDDDLTIPRAAINKMIKETLPNVRVANDARELVVNCCTEFIHLISSEANE |
| | HUMAN | ICNKSEKKTISPEHVIQALESLGFGSY |
| 541 | DLX4_ | ERRPQAPAKKLRKPRTIYSSLQLQHLNQRFQHTQYLALPERAQLAAQLGLT |
| | HUMAN | QTQVKIWFQNKRSKYKKLLKQNSGGQEGD |
| 542 | SRY_ | NVQDRVKRPMNAFIVWSRDQRRKMALENPRMRNSEISKQLGYQWKMLTE |
| | HUMAN | AEKWPFFQEAQKLQAMHREKYPNYKYRPRRK |
| 543 | ZN777_ | EITRLAVWAAVQAVERKLEAQAMRLLTLEGRTGTNEKKIADCEKTAVEFA |
| | HUMAN | NHLESKWVVLGTLLQEYGLLQRRLENMENL |
| 544 | NELL1_ | CEKDIDECSEGIIECHNHSRCVNLPGWYHCECRSGFHDDGTYSLSGESCIDID |
| | HUMAN | ECALRTHTCWNDSACINLAGGFDCLCP |
| 545 | ZN398_ | AAISLWTVVAAVQAIERKVEIHSRRLLHLEGRTGTAEKKLASCEKTVTELG |
| | HUMAN | NQLEGKWAVLGTLLQEYGLLQRRLENLEN |
| 546 | GATA3_ | GQNRPLIKPKRRLSAARRAGTSCANCQTTTTTLWRRNANGDPVCNACGLY |
| | HUMAN | YKLHNINRPLTMKKEGIQTRNRKMSSKSKK |
| 547 | BSH_ | HAELPGKHCRRRKARTVFSDSQLSGLEKRFEIQRYLSTPERVELATALSLSE |
| | HUMAN | TQVKTWFQNRRMKHKKQLRKSQDEPKAP |
| 548 | SF3B4_ | QDATVYVGGLDEKVSEPLLWELFLQAGPVVNTHMPKDRVTGQHQGYGFV |
| | HUMAN | EFLSEEDADYAIKIMNMIKLYGKPIRVNKAS |
| 549 | TEAD1_ | PIDNDAEGVWSPDIEQSFQEALAIYPPCGRRKIILSDEGKMYGRNELIARYIK |
| | HUMAN | LRTGKTRTRKQVSSHIQVLARRKSRDF |
| 550 | TEAD3_ | GLDNDAEGVWSPDIEQSFQEALAIYPPCGRRKIILSDEGKMYGRNELIARYI |
| | HUMAN | KLRTGKTRTRKQVSSHIQVLARKKVREY |
| 551 | RGAP1_ | DSVGTPQSNGGMRLHDFVSKTVIKPESCVPCGKRIKFGKLSLKCRDCRVVS |
| | HUMAN | HPECRDRCPLPCIPTLIGTPVKIGEGMLA |
| 552 | PHF1_ | SAPHSMTASSSSVSSPSPGLPRRSAPPSPLCRSLSPGTGGGVRGGVGYLSRGD |
| | HUMAN | PVRVLARRVRPDGSVQYLVEWGGGGIF |
| 553 | FOXA1_ | GDPHYSFNHPFSINNLMSSSEQQHKLDFKAYEQALQYSPYGSTLPASLPLGS |
| | HUMAN | ASVTTRSPIEPSALEPAYYQGVYSRPVL |
| 554 | GATA2_ | GQNRPLIKPKRRLSAARRAGTCCANCQTTTTTLWRRNANGDPVCNACGLY |
| | HUMAN | YKLHNVNRPLTMKKEGIQTRNRKMSNKSKK |
| 555 | FOXO3_ | DSLSGSSLYSTSANLPVMGHEKFPSDLDLDMFNGSLECDMESIIRSELMDAD |
| | HUMAN | GLDFNFDSLISTQNVVGLNVGNFTGAKQ |
| 556 | ZN212_ | TEISLWTVVAAIQAVEKKMESQAARLQSLEGRTGTAEKKLADCEKMAVEF |
| | HUMAN | GNQLEGKWAVLGTLLQEYGLLQRRLENVEN |
| 557 | IRX4_ | MDSGTRRKNATRETTSTLKAWLQEHRKNPYPTKGEKIMLAIITKMTLTQVS |
| | HUMAN | TWFANARRRLKKENKMTWPPRNKCADEKR |
| 558 | ZBED6_ | NIEKQIYLPSTRAKTSIVWHFFHVDPQYTWRAICNLCEKSVSRGKPGSHLGT |
| | HUMAN | STLQRHLQARHSPHWTRANKFGVASGEE |
| 559 | LHX4_ | AKQNDDSEAGAKRPRTTITAKQLETLKNAYKNSPKPARHVREQLSSETGLD |
| | HUMAN | MRVVQVWFQNRRAKEKRLKKDAGRHRWGQ |
| 560 | SIN3A_ | DALSYLDQVKLQFGSQPQVYNDFLDIMKEFKSQSIDTPGVISRVSQLFKGHP |
| | HUMAN | DLIMGFNTFLPPGYKIEVQTNDMVNVTT |
| 561 | RBBP7_ | DDHTVCLWDINAGPKEGKIVDAKAIFTGHSAVVEDVAWHLLHESLFGSVA |
| | HUMAN | DDQKLMIWDTRSNTTSKPSHLVDAHTAEVN |
| 562 | NKX61_ | GSILLDKDGKRKHTRPTFSGQQIFALEKTFEQTKYLAGPERARLAYSLGMTE |
| | HUMAN | SQVKVWFQNRRTKWRKKHAAEMATAKKK |
| 563 | TRI68_ | DPTALVEAIVEEVACPICMTFLREPMSIDCGHSFCHSCLSGLWEIPGESQNW |
| | HUMAN | GYTCPLCRAPVQPRNLRPNWQLANVVEK |
| 564 | R51A1_ | QSLPKKVSLSSDTTRKPLEIRSPSAESKKPKWVPPAASGGSRSSSSPLVVVSV |
| | HUMAN | KSPNQSLRLGLSRLARVKPLHPNATST |
| 565 | MB3L1_ | AKSSQRKQRDCVNQCKSKPGLSTSIPLRMSSYTFKRPVTRITPHPGNEVRYH |
| | HUMAN | QWEESLEKPQQVCWQRRLQGLQAYSSAG |
| 566 | DLX5_ | VRMVNGKPKKVRKPRTIYSSFQLAALQRRFQKTQYLALPERAELAASLGLT |
| | HUMAN | QTQVKIWFQNKRSKIKKIMKNGEMPPEHS |
| 567 | NOTC1_ | LQCNNHACGWDGGDCSLNFNDPWKNCTQSLQCWKYFSDGHCDSQCNSA |
| | HUMAN | GCLFDGFDCQRAEGQCNPLYDQYCKDHFSDGH |
| 568 | TERF2_ | ETWVEEDELFQVQAAPDEDSTTNITKKQKWTVEESEWVKAGVQKYGEGN |
| | HUMAN | WAAISKNYPFVNRTAVMIKDRWRTMKRLGMN |
| 569 | ZN282_ | AEISLWTVVAAIQAVERKVDAQASQLLNLEGRTGTAEKKLADCEKTAVEF |
| | HUMAN | GNHMESKWAVLGTLLQEYGLLQRRLENLEN |
| 570 | RGS12_ | LEKRTLFRLDLVPINRSVGLKAKPTKPVTEVLRPVVARYGLDLSGLLVRLSG |
| | HUMAN | EKEPLDLGAPISSLDGQRVVLEEKDPSR |
| 571 | ZN840_ | PNCLSSSMQLPHGGGRHQELVRFRDVAVVFSPEEWDHLTPEQRNLYKDVM |
| | HUMAN | LDNCKYLASLGNWTYKAHVMSSLKQGKEPW |
| 572 | SPI2B_ | DDYKEGDLRIMPESSESPPTEREPGGVVDGLIGKHVEYTKEDGSKRIGMVIH |
| | HUMAN | QVEAKPSVYFIKFDDDFHIYVYDLVKKS |
| 573 | PAX7_ | SEPDLPLKRKQRRSRTTFTAEQLEELEKAFERTHYPDIYTREELAQRTKLTE |
| | HUMAN | ARVQVWFSNRRARWRKQAGANQLAAFNH |
| 574 | NKX62_ | AGGVLDKDGKKKHSRPTFSGQQIFALEKTFEQTKYLAGPERARLAYSLGMT |
| | HUMAN | ESQVKVWFQNRRTKWRKRHAVEMASAKKK |
| 575 | ASXL2_ | DVMSFSVTVTTIPASQAMNPSSHGQTIPVQAFSEENSIEGTPSKCYCRLKAMI |
| | HUMAN | MCKGCGAFCHDDCIGPSKLCVSCLVVR |
| 576 | FOXO1_ | GGYSSVSSCNGYGRMGLLHQEKLPSDLDGMFIERLDCDMESIIRNDLMDGD |
| | HUMAN | TLDFNFDNVLPNQSFPHSVKTTTHSWVSG |
| 577 | GATA3_ | GGSPTGFGCKSRPKARSSTGRECVNCGATSTPLWRRDGTGHYLCNACGLY |
| | HUMAN | HKMNGQNRPLIKPKRRLSAARRAGTSCANC |
| 578 | GATA1_ | GQNRPLIRPKKRLIVSKRAGTQCTNCQTTTTTLWRRNASGDPVCNACGLYY |
| | HUMAN | KLHQVNRPLTMRKDGIQTRNRKASGKGKK |
| 579 | ZMYM5_ | PVALLRKQNFQPTAQQQLTKPAKITCANCKKPLQKGQTAYQRKGSAHLFC |
| | HUMAN | STTCLSSFSHKRTQNTRSIICKKDASTKKA |
| 580 | ZN783_ | TEITLWTVVAAIQALEKKVDSCLTRLLTLEGRTGTAEKKLADCEKTAVEFG |
| | HUMAN | NQLEGKWAVLGTLLQEYGLLQRRLENVEN |
| 581 | SPI2B_ | KKQRGRPSSQPRRNIVGCRISHGWKEGDEPITQWKGTVLDQVPINPSLYLV |
| | HUMAN | KYDGIDCVYGLELHRDERVLSLKILSDRV |
| 582 | LRP1_ | WTCDLDDDCGDRSDESASCAYPTCFPLTQFTCNNGRCININWRCDNDNDC |
| | HUMAN | GDNSDEAGCSHSCSSTQFKCNSGRCIPEHW |
| 583 | MIXL1_ | PKGAAAPSASQRRKRTSFSAEQLQLLELVFRRTRYPDIHLRERLAALTLLPE |
| | HUMAN | SRIQVWFQNRRAKSRRQSGKSFQPLARP |
| 584 | SGT1_ | KIKYDWYQTESQVVITLMIKNVQKNDVNVEFSEKELSALVKLPSGEDYNLK |
| | MAN | LELLHPIIPEQSTFKVLSTKIEIKLKKPE |
| 585 | LMCD1_ | DPSKEVEYVCELCKGAAPPDSPVVYSDRAGYNKQWHPTCFVCAKCSEPLV |
| | HUMAN | DLIYFWKDGAPWCGRHYCESLRPRCSGCDE |
| 586 | CEBPA_ | GSGAGKAKKSVDKNSNEYRVRRERNNIAVRKSRDKAKQRNVETQQKVLE |
| | HUMAN | LTSDNDRLRKRVEQLSRELDTLRGIFRQLPE |
| 587 | GATA2_ | GPASSFTPKQRSKARSCSEGRECVNCGATATPLWRRDGTGHYLCNACGLY |
| | HUMAN | HKMNGQNRPLIKPKRRLSAARRAGTCCANC |
| 588 | SOX14_ | KPSDHIKRPMNAFMVWSRGQRRKMAQENPKMHNSEISKRLGAEWKLLSE |
| | HUMAN | AEKRPYIDEAKRLRAQHMKEHPDYKYRPRRK |
| 589 | WTIP_ | LYSGFQQTADKCSVCGHLIMEMILQALGKSYHPGCFRCSVCNECLDGVPFT |
| | HUMAN | VDVENNIYCVRDYHTVFAPKCASCARPIL |
| 590 | PRP19_ | HPSQDLVFSASPDATIRIWSVPNASCVQVVRAHESAVTGLSLHATGDYLLSS |
| | HUMAN | SDDQYWAFSDIQTGRVLTKVTDETSGCS |
| 591 | CBX6_ | ELSAVGERVFAAESIIKRRIRKGRIEYLVKWKGWAIKYSTWEPEENILDSRLI |
| | HUMAN | AAFEQKERERELYGPKKRGPKPKTFLL |
| 592 | NKX11_ | RTGSDSKSGKPRRARTAFTYEQLVALENKFKATRYLSVCERLNLALSLSLTE |
| | HUMAN | TQVKIWFQNRRTKWKKQNPGADTSAPTG |
| 593 | RBBP4_ | VWDLSKIGEEQSPEDAEDGPPELLFIHGGHTAKISDFSWNPNEPWVICSVSE |
| | HUMAN | DNIMQVWQMAENIYNDEDPEGSVDPEGQ |
| 594 | DMRT2_ | ERCTPAGGGAEPRKLSRTPKCARCRNHGVVSCLKGHKRFCRWRDCQCANC |
| | HUMAN | LLVVERQRVMAAQVALRRQQATEDKKGLSG |
| 595 | SMCA2_ | SQPGALIPGDPQAMSQPNRGPSPFSPVQLHQLRAQILAYKMLARGQPLPETL |
| | HUMAN | QLAVQGKRTLPGLQQQQQQQQQQQQQQQ |
| 596 | ZNF10 | MDAKSLTAWSRTLVTFKDVFVDFTREEWKLLDTAQQIVYRNVMLENYKN |
| | | LVSLGYQLTKPDVILRLEKGEEPWLVEREIHQETHPDSETAFEIKSSVSSRSIF |
| | | KDKQSCDIKMEGMARNDLWYLSLEEVWKCRDQLDKYQENPERHLRQVAF |
| | | TQKKVLTQERVSESGKYGGNCLLPAQLVLREYFHKRDSHTKSLKHDLVLN |
| | | GHQDSCASNSNECGQTFCQNIHLIQFARTHTGDKSYKCPDNDNSLTHGSSL |
| | | GISKGIHREKPYECKECGKFFSWRSNLTRHQLIHTGEKPYECKECGKSFSRSS |
| | | HLIGHQKTHTGEEPYECKECGKSFSWFSHLVTHQRTHTGDKLYTCNQCGKS |
| | | FVHSSRLIRHQRTHTGEKPYECPECGKSFRQSTHLILHQRTHVRVRPYECNE |
| | | CGKSYSQRSHLVVHHRIHTGLKPFECKDCGKCFSRSSHLYSHQRTHTGEKP |
| | | YECHDCGKSFSQSSALIVHQRIHTGEKPYECCQCGKAFIRKNDLIKHQRIHV |
| | | GEETYKCNQCGIIFSQNSPFIVHQIAHTGEQFLTCNQCGTALVNTSNLIGYQT |
| | | NHIRENAY |
| 597 | KAP1 | MAASAAAASAAAASAASGSPGPGEGSAGGEKRSTAPSAAASASASAAASSP |
| | | AGGGAEALELLEHCGVCRERLRPEREPRLLPCLHSACSACLGPAAPAAANS |
| | | SGDGGAAGDGTVVDCPVCKQQCFSKDIVENYFMRDSGSKAATDAQDANQ |
| | | CCTSCEDNAPATSYCVECSEPLCETCVEAHQRVKYTKDHTVRSTGPAKSRD |
| | | GERTVYCNVHKHEPLVLFCESCDTLTCRDCQLNAHKDHQYQFLEDAVRNQ |
| | | RKLLASLVKRLGDKHATLQKSTKEVRSSIRQVSDVQKRVQVDVKMAILQI |
| | | MKELNKRGRVLVNDAQKVTEGQQERLERQHWTMTKIQKHQEHILRFASW |
| | | ALESDNNTALLLSKKLIYFQLHRALKMIVDPVEPHGEMKFQWDLNAWTKS |
| | | AEAFGKIVAERPGTNSTGPAPMAPPRAPGPLSKQGSGSSQPMEVQEGYGFG |
| | | SGDDPYSSAEPHVSGVKRSRSGEGEVSGLMRKVPRVSLERLDLDLTADSQP |
| | | PVFKVFPGSTTEDYNLIVIERGAAAAATGQPGTAPAGTPGAPPLAGMAIVKE |
| | | EETEAAIGAPPTATEGPETKPVLMALAEGPGAEGPRLASPSGSTSSGLEVVA |
| | | PEGTSAPGGGPGTLDDSATICRVCQKPGDLVMCNQCEFCFHLDCHLPALQD |
| | | VPGEEWSCSLCHVLPDLKEEDGSLSLDGADSTGVVAKLSPANQRKCERVLL |
| | | ALFCHEPCRPLHQLATDSTFSLDQPGGTLDLTLIRARLQEKLSPPYSSPQEFA |
| | | QDVGRMFKQFNKLTEDKADVQSIIGLQRFFETRMNEAFGDTKFSAVLVEPP |
| | | PMSLPGAGLSSQELSGGPGDGP |
| 598 | MECP2 | MVAGMLGLREEKSEDQDLQGLKDKPLKFKKVKKDKKEEKEGKHEPVQPS |
| | | AHHSAEPAEAGKAETSEGSGSAPAVPEASASPKQRRSIIRDRGPMYDDPTLP |
| | | EGWTRKLKQRKSGRSAGKYDVYLINPQGKAFRSKVELIAYFEKVGDTSLDP |
| | | NDFDFTVTGRGSPSRREQKPPKKPKSPKAPGTGRGRGRPKGSGTTRPKAAT |
| | | SEGVQVKRVLEKSPGKLLVKMPFQTSPGGKAEGGGATTSTQVMVIKRPGR |
| | | KRKAEADPQAIPKKRGRKPGSVVAAAAAEAKKKAVKESSIRSVQETVLPIK |
| | | KRKTRETVSIEVKEVVKPLLVSTLGEKSGKGLKTCKSPGRKSKESSPKGRSS |
| | | SASSPPKKEHHHHHHHSESPKAPVPLLPPLPPPPPEPESSEDPTSPPEPQDLSS |
| | | SVCKEEKMPRGGSLESDGCPKEPAKTQPAVATAATAAEKYKHRGEGERKD |
| | | IVSSSMPRPNREEPVDSRTPVTERVS |
| 599 | human | MSRSRHARPSRLVRKEDVNKKKKNSQLRKTTKGANKNVASVKTLSPGKLK |
| | TET1 | QLIQERDVKKKTEPKPPVPVRSLLTRAGAARMNLDRTEVLFQNPESLTCNG |
| | | FTMALRSTSLSRRLSQPPLVVAKSKKVPLSKGLEKQHDCDYKILPALGVKH |
| | | SENDSVPMQDTQVLPDIETLIGVQNPSLLKGKSQETTQFWSQRVEDSKINIPT |
| | | HSGPAAEILPGPLEGTRCGEGLFSEETLNDTSGSPKMFAQDTVCAPFPQRAT |
| | | PKVTSQGNPSIQLEELGSRVESLKLSDSYLDPIKSEHDCYPTSSLNKVIPDLN |
| | | LRNCLALGGSTSPTSVIKFLLAGSKQATLGAKPDHQEAFEATANQQEVSDT |
| | | TSFLGQAFGAIPHQWELPGADPVHGEALGETPDLPEIPGAIPVQGEVFGTILD |
| | | QQETLGMSGSVVPDLPVFLPVPPNPIATFNAPSKWPEPQSTVSYGLAVQGAI |
| | | QILPLGSGHTPQSSSNSEKNSLPPVMAISNVENEKQVHISFLPANTQGFPLAP |
| | | ERGLFHASLGIAQLSQAGPSKSDRGSSQVSVTSTVHVVNTTVVTMPVPMVS |
| | | TSSSSYTTLLPTLEKKKRKRCGVCEPCQQKTNCGECTYCKNRKNSHQICKK |
| | | RKCEELKKKPSVVVPLEVIKENKRPQREKKPKVLKADFDNKPVNGPKSESM |
| | | DYSRCGHGEEQKLELNPHTVENVTKNEDSMTGIEVEKWTQNKKSQLTDHV |
| | | KGDFSANVPEAEKSKNSEVDKKRTKSPKLFVQTVRNGIKHVHCLPAETNVS |
| | | FKKFNIEEFGKTLENNSYKFLKDTANHKNAMSSVATDMSCDHLKGRSNVL |
| | | VFQQPGFNCSSIPHSSHSIINHHASIHNEGDQPKTPENIPSKEPKDGSPVQPSL |
| | | LSLMKDRRLTLEQVVAIEALTQLSEAPSENSSPSKSEKDEESEQRTASLLNSC |
| | | KAILYTVRKDLQDPNLQGEPPKLNHCPSLEKQSSCNTVVFNGQTTTLSNSHI |
| | | NSATNQASTKSHEYSKVTNSLSLFIPKSNSSKIDTNKSIAQGIITLDNCSNDLH |
| | | QLPPRNNEVEYCNQLLDSSKKLDSDDLSCQDATHTQIEEDVATQLTQLASII |
| | | KINYIKPEDKKVESTPTSLVTCNVQQKYNQEKGTIQQKPPSSVHNNHGSSLT |
| | | KQKNPTQKKTKSTPSRDRRKKKPTVVSYQENDRQKWEKLSYMYGTICDIW |
| | | IASKFQNFGQFCPHDFPTVFGKISSSTKIWKPLAQTRSIMQPKTVFPPLTQIKL |
| | | QRYPESAEEKVKVEPLDSLSLFHLKTESNGKAFTDKAYNSQVQLTVNANQ |
| | | KAHPLTQPSSPPNQCANVMAGDDQIRFQQVVKEQLMHQRLPTLPGISHETP |
| | | LPESALTLRNVNVVCSGGITVVSTKSEEEVCSSSFGTSEFSTVDSAQKNFND |
| | | YAMNFFTNPTKNLVSITKDSELPTCSCLDRVIQKDKGPYYTHLGAGPSVAA |
| | | VREIMENRYGQKGNAIRIEIVVYTGKEGKSSHGCPIAKWVLRRSSDEEKVLC |
| | | LVRQRTGHHCPTAVMVVLIMVWDGIPLPMADRLYTELTENLKSYNGHPTD |
| | | RRCTLNENRTCTCQGIDPETCGASFSFGCSWSMYFNGCKFGRSPSPRRFRID |
| | | PSSPLHEKNLEDNLQSLATRLAPIYKQYAPVAYQNQVEYENVARECRLGSK |
| | | EGRPFSGVTACLDFCAHPHRDIHNMNNGSTVVCTLTREDNRSLGVIPQDEQ |
| | | LHVLPLYKLSDTDEFGSKEGMEAKIKSGAIEVLAPRRKKRTCFTQPVPRSGK |
| | | KRAAMMTEVLAHKIRAVEKKPIPRIKRKNNSTTTNNSKPSSLPTLGSNTETV |
| | | QPEVKSETEPHFILKSSDNTKTYSLMPSAPHPVKEASPGFSWSPKTASATPAP |
| | | LKNDATASCGFSERSSTPHCTMPSGRLSGANAAAADGPGISQLGEVAPLPTL |
| | | SAPVMEPLINSEPSTGVTEPLTPHQPNHQPSFLTSPQDLASSPMEEDEQHSEA |
| | | DEPPSDEPLSDDPLSPAEEKLPHIDEYWSDSEHIFLDANIGGVAIAPAHGSVLI |
| | | ECARRELHATTPVEHPNRNHPTRLSLVFYQHKNLNKPQHGFELNKIKFEAK |
| | | EAKNKKMKASEQKDQAANEGPEQSSEVNELNQIPSHKALTLTHDNVVTVS |
| | | PYALTHVAGPYNHWV |
| 600 | human | MEQDRTNHVEGNRLSPFLIPSPPICQTEPLATKLQNGSPLPERAHPEVNGDT |
| | TET2 | KWHSFKSYYGIPCMKGSQNSRVSPDFTQESRGYSKCLQNGGIKRTVSEPSLS |
| | | GLLQIKKLKQDQKANGERRNFGVSQERNPGESSQPNVSDLSDKKESVSSVA |
| | | QENAVKDFTSFSTHNCSGPENPELQILNEQEGKSANYHDKNIVLLKNKAVL |
| | | MPNGATVSASSVEHTHGELLEKTLSQYYPDCVSIAVQKTTSHINAINSQATN |
| | | ELSCEITHPSHTSGQINSAQTSNSELPPKPAAVVSEACDADDADNASKLAAM |
| | | LNTCSFQKPEQLQQQKSVFEICPSPAENNIQGTTKLASGEEFCSGSSSNLQAP |
| | | GGSSERYLKQNEMNGAYFKQSSVFTKDSFSATTTPPPPSQLLLSPPPPLPQVP |
| | | QLPSEGKSTLNGGVLEEHHHYPNQSNTTLLREVKIEGKPEAPPSQSPNPSTH |
| | | VCSPSPMLSERPQNNCVNRNDIQTAGTMTVPLCSEKTRPMSEHLKHNPPIFG |
| | | SSGELQDNCQQLMRNKEQEILKGRDKEQTRDLVPPTQHYLKPGWIELKAPR |
| | | FHQAESHLKRNEASLPSILQYQPNLSNQMTSKQYTGNSNMPGGLPRQAYTQ |
| | | KTTQLEHKSQMYQVEMNQGQSQGTVDQHLQFQKPSHQVHFSKTDHLPKA |
| | | HVQSLCGTRFHFQQRADSQTEKLMSPVLKQHLNQQASETEPFSNSHLLQHK |
| | | PHKQAAQTQPSQSSHLPQNQQQQQKLQIKNKEEILQTFPHPQSNNDQQREG |
| | | SFFGQTKVEECFHGENQYSKSSEFETHNVQMGLEEVQNINRRNSPYSQTMK |
| | | SSACKIQVSCSNNTHLVSENKEQTTHPELFAGNKTQNLHHMQYFPNNVIPK |
| | | QDLLHRCFQEQEQKSQQASVLQGYKNRNQDMSGQQAAQLAQQRYLIHNH |
| | | ANVFPVPDQGGSHTQTPPQKDTQKHAALRWHLLQKQEQQQTQQPQTESCH |
| | | SQMHRPIKVEPGCKPHACMHTAPPENKTWKKVTKQENPPASCDNVQQKSII |
| | | ETMEQHLKQFHAKSLFDHKALTLKSQKQVKVEMSGPVTVLTRQTTAAELD |
| | | SHTPALEQQTTSSEKTPTKRTAASVLNNFIESPSKLLDTPIKNLLDTPVKTQY |
| | | DFPSCRCVEQIIEKDEGPFYTHLGAGPNVAAIREIMEERFGQKGKAIRIERVI |
| | | YTGKEGKSSQGCPIAKWVVRRSSSEEKLLCLVRERAGHTCEAAVIVILILVW |
| | | EGIPLSLADKLYSELTETLRKYGTLTNRRCALNEERTCACQGLDPETCGASF |
| | | SFGCSWSMYYNGCKFARSKIPRKFKLLGDDPKEEEKLESHLQNLSTLMAPT |
| | | YKKLAPDAYNNQIEYEHRAPECRLGLKEGRPFSGVTACLDFCAHAHRDLH |
| | | NMQNGSTLVCTLTREDNREFGGKPEDEQLHVLPLYKVSDVDEFGSVEAQE |
| | | EKKRSGAIQVLSSFRRKVRMLAEPVKTCRQRKLEAKKAAAEKLSSLENSSN |
| | | KNEKEKSAPSRTKQTENASQAKQLAELLRLSGPVMQQSQQPQPLQKQPPQP |
| | | QQQQRPQQQQPHHPQTESVNSYSASGSTNPYMRRPNPVSPYPNSSHTSDIY |
| | | GSTSPMNFYSTSSQAAGSYLNSSNPMNPYPGLLNQNTQYPSYQCNGNLSVD |
| | | NCSPYLGSYSPQSQPMDLYRYPSQDPLSKLSLPPIHTLYQPRFGNSQSFTSKY |
| | | LGYGNQNMQGDGFSSCTIRPNVHHVGKLPPYPTHEMDGHFMGATSRLPPN |
| | | LSNPNMDYKNGEHHSPSHIIHNYSAAPGMFNSSLHALHLQNKENDMLSHT |
| | | ANGLSKMLPALNHDRTACVQGGLHKLSDANGQEKQPLALVQGVASGAED |
| | | NDEVWSDSEQSFLDPDIGGVAVAPTHGSILIECAKRELHATTPLKNPNRNHP |
| | | TRISLVFYQHKSMNEPKHGLALWEAKMAEKAREKEEECEKYGPDYVPQKS |
| | | HGKKVKREPAEPHETSEPTYLRFIKSLAERTMSVTTDSTVTTSPYAFTRVTG |
| | | PYNRYI |
| 601 | human | MSQFQVPLAVQPDLPGLYDFPQRQVMVGSFPGSGLSMAGSESQLRGGGDG |
| | TET3 | RKKRKRCGTCEPCRRLENCGACTSCTNRRTHQICKLRKCEVLKKKVGLLKE |
| | | VEIKAGEGAGPWGQGAAVKTGSELSPVDGPVPGQMDSGPVYHGDSRQLSA |
| | | SGVPVNGAREPAGPSLLGTGGPWRVDQKPDWEAAPGPAHTARLEDAHDL |
| | | VAFSAVAEAVSSYGALSTRLYETFNREMSREAGNNSRGPRPGPEGCSAGSE |
| | | DLDTLQTALALARHGMKPPNCNCDGPECPDYLEWLEGKIKSVVMEGGEER |
| | | PRLPGPLPPGEAGLPAPSTRPLLSSEVPQISPQEGLPLSQSALSIAKEKNISLQT |
| | | AIAIEALTQLSSALPQPSHSTPQASCPLPEALSPPAPFRSPQSYLRAPSWPVVP |
| | | PEEHSSFAPDSSAFPPATPRTEFPEAWGTDTPPATPRSSWPMPRPSPDPMAEL |
| | | EQLLGSASDYIQSVFKRPEALPTKPKVKVEAPSSSPAPAPSPVLQREAPTPSS |
| | | EPDTHQKAQTALQQHLHHKRSLFLEQVHDTSFPAPSEPSAPGWWPPPSSPV |
| | | PRLPDRPPKEKKKKLPTPAGGPVGTEKAAPGIKPSVRKPIQIKKSRPREAQPL |
| | | FPPVRQIVLEGLRSPASQEVQAHPPAPLPASQGSAVPLPPEPSLALFAPSPSRD |
| | | SLLPPTQEMRSPSPMTALQPGSTGPLPPADDKLEELIRQFEAEFGDSFGLPGP |
| | | PSVPIQDPENQQTCLPAPESPFATRSPKQIKIESSGAVTVLSTTCFHSEEGGQE |
| | | ATPTKAENPLTPTLSGFLESPLKYLDTPTKSLLDTPAKRAQAEFPTCDCVEQI |
| | | VEKDEGPYYTHLGSGPTVASIRELMEERYGEKGKAIRIEKVIYTGKEGKSSR |
| | | GCPIAKWVIRRHTLEEKLLCLVRHRAGHHCQNAVIVILILAWEGIPRSLGDT |
| | | LYQELTDTLRKYGNPTSRRCGLNDDRTCACQGKDPNTCGASFSFGCSWSM |
| | | YFNGCKYARSKTPRKFRLAGDNPKEEEVLRKSFQDLATEVAPLYKRLAPQA |
| | | YQNQVTNEEIAIDCRLGLKEGRPFAGVTACMDFCAHAHKDQHNLYNGCTV |
| | | VCTLTKEDNRCVGKIPEDEQLHVLPLYKMANTDEFGSEENQNAKVGSGAIQ |
| | | VLTAFPREVRRLPEPAKSCRQRQLEARKAAAEKKKIQKEKLSTPEKIKQEAL |
| | | ELAGITSDPGLSLKGGLSQQGLKPSLKVEPQNHFSSFKYSGNAVVESYSVLG |
| | | NCRPSDPYSMNSVYSYHSYYAQPSLTSVNGFHSKYALPSFSYYGFPSSNPVF |
| | | PSQFLGPGAWGHSGSSGSFEKKPDLHALHNSLSPAYGGAEFAELPSQAVPT |
| | | DAHHPTPHHQQPAYPGPKEYLLPKAPLLHSVSRDPSPFAQSSNCYNRSIKQE |
| | | PVDPLTQAEPVPRDAGKMGKTPLSEVSQNGGPSHLWGQYSGGPSMSPKRT |
| | | NGVGGSWGVFSSGESPAIVPDKLSSFGASCLAPSHFTDGQWGLFPGEGQQA |
| | | ASHSGGRLRGKPWSPCKFGNSTSALAGPSLTEKPWALGAGDFNSALKGSPG |
| | | FQDKLWNPMKGEEGRIPAAGASQLDRAWQSFGLPLGSSEKLFGALKSEEKL |
| | | WDPFSLEEGPAEEPPSKGAVKEEKGGGGAEEEEEELWSDSEHNFLDENIGG |
| | | VAVAPAHGSILIECARRELHATTPLKKPNRCHPTRISLVFYQHKNLNQPNHG |
| | | LALWEAKMKQLAERARARQEEAARLGLGQQEAKLYGKKRKWGGTVVAE |
| | | PQQKEKKGVVPTRQALAVPTDSAVTVSSYAYTKVTGPYSRWI |
| 502 | human | MEAENAGSYSLQQAQAFYTFPFQQLMAEAPNMAVVNEQQMPEEVPAPAP |
| | TDG | AQEPVQEAPKGRKRKPRTTEPKQPVEPKKPVESKKSGKSAKSKEKQEKITD |
| | | TFKVKRKVDRFNGVSEAELLTKTLPDILTFNLDIVIIGINPGLMAAYKGHHY |
| | | PGPGNHFWKCLFMSGLSEVQLNHMDDHTLPGKYGIGFTNMVERTTPGSKD |
| | | LSSKEFREGGRILVQKLQKYQPRIAVFNGKCIYEIFSKEVFGVKVKNLEFGL |
| | | QPHKIPDTETLCYVMPSSSARCAQFPRAQDKVHYYIKLKDLRDQLKGIERN |
| | | MDVQEVQYTFDLQLAQEDAKKMAVKEEKYDPGYEAAYGGAYGENPCSSE |
| | | PCGFSSNGLIESVELRGESAFSGIPNGQWMTQSFTDQIPSFSNHCGTQEQEEE |
| | | SHA |
| 603 | arabidopsis | MEKQRREESSFQQPPWIPQTPMKPFSPICPYTVEDQYHSSQLEERRFVGNKD |
| | ROS1 | MSGLDHLSFGDLLALANTASLIFSGQTPIPTRNTEVMQKGTEEVESLSSVSN |
| | | NVAEQILKTPEKPKRKKHRPKVRREAKPKREPKPRAPRKSVVTDGQESKTP |
| | | KRKYVRKKVEVSKDQDATPVESSAAVETSTRPKRLCRRVLDFEAENGENQ |
| | | TNGDIREAGEMESALQEKQLDSGNQELKDCLLSAPSTPKRKRSQGKRKGV |
| | | QPKKNGSNLEEVDISMAQAAKRRQGPTCCDMNLSGIQYDEQCDYQKMHW |
| | | LYSPNLQQGGMRYDAICSKVFSGQQHNYVSAFHATCYSSTSQLSANRVLTV |
| | | EERREGIFQGRQESELNVLSDKIDTPIKKKTTGHARFRNLSSMNKLVEVPEH |
| | | LTSGYCSKPQQNNKILVDTRVTVSKKKPTKSEKSQTKQKNLLPNLCRFPPSF |
| | | TGLSPDELWKRRNSIETISELLRLLDINREHSETALVPYTMNSQIVLFGGGAG |
| | | AIVPVTPVKKPRPRPKVDLDDETDRVWKLLLENINSEGVDGSDEQKAKWW |
| | | EEERNVFRGRADSFIARMHLVQGDRRFTPWKGSVVDSVVGVFLTQNVSDH |
| | | LSSSAFMSLASQFPVPFVPSSNFDAGTSSMPSIQITYLDSEETMSSPPDHNHSS |
| | | VTLKNTQPDEEKDYVPSNETSRSSSEIAISAHESVDKTTDSKEYVDSDRKGS |
| | | SVEVDKTDEKCRVLNLFPSEDSALTCQHSMVSDAPQNTERAGSSSEIDLEGE |
| | | YRTSFMKLLQGVQVSLEDSNQVSPNMSPGDCSSEIKGFQSMKEPTKSSVDS |
| | | SEPGCCSQQDGDVLSCQKPTLKEKGKKVLKEEKKAFDWDCLRREAQARA |
| | | GIREKTRSTMDTVDWKAIRAADVKEVAETIKSRGMNHKLAERIQGFLDRLV |
| | | NDHGSIDLEWLRDVPPDKAKEYLLSFNGLGLKSVECVRLLTLHHLAFPVDT |
| | | NVGRIAVRLGWVPLQPLPESLQLHLLEMYPMLESIQKYLWPRLCKLDQKTL |
| | | YELHYQMITFGKVFCTKSKPNCNACPMKGECRHFASAFASARLALPSTEKG |
| | | MGTPDKNPLPLHLPEPFQREQGSEVVQHSEPAKKVTCCEPIIEEPASPEPETA |
| | | EVSIADIEEAFFEDPEEIPTIRLNMDAFTSNLKKIMEHNKELQDGNMSSALVA |
| | | LTAETASLPMPKLKNISQLRTEHRVYELPDEHPLLAQLEKREPDDPCSYLLA |
| | | IWTPGETADSIQPSVSTCIFQANGMLCDEETCFSCNSIKETRSQIVRGTILIPCR |
| | | TAMRGSFPLNGTYFQVNEVFADHASSLNPINVPRELIWELPRRTVYFGTSVP |
| | | TIFKGLSTEKIQACFWKGYVCVRGFDRKTRGPKPLIARLHFPASKLKGQQA |
| | | NLA |
| 604 | arabidopsis | MNSRADPGDRYFRVPLENQTQQEFMGSWIPFTPKKPRSSLMVDERVINQDL |
| | DME | NGFPGGEFVDRGFCNTGVDHNGVFDHGAHQGVTNLSMMINSLAGSHAQA |
| | | WSNSERDLLGRSEVTSPLAPVIRNTTGNVEPVNGNFTSDVGMVNGPFTQSG |
| | | TSQAGYNEFELDDLLNPDQMPFSFTSLLSGGDSLFKVRQYGPPACNKPLYN |
| | | LNSPIRREAVGSVCESSFQYVPSTPSLFRTGEKTGFLEQIVTTTGHEIPEPKSD |
| | | KSMQSIMDSSAVNATEATEQNDGSRQDVLEFDLNKTPQQKPSKRKRKFMP |
| | | KVVVEGKPKRKPRKPAELPKVVVEGKPKRKPRKAATQEKVKSKETGSAKK |
| | | KNLKESATKKPANVGDMSNKSPEVTLKSCRKALNFDLENPGDARQGDSES |
| | | EIVQNSSGANSFSEIRDAIGGTNGSFLDSVSQIDKTNGLGAMNQPLEVSMGN |
| | | QPDKLSTGAKLARDQQPDLLTRNQQCQFPVATQNTQFPMENQQAWLQMK |
| | | NQLIGFPFGNQQPRMTIRNQQPCLAMGNQQPMYLIGTPRPALVSGNQQLGG |
| | | PQGNKRPIFLNHQTCLPAGNQLYGSPTDMHQLVMSTGGQQHGLLIKNQQP |
| | | GSLIRGQQPCVPLIDQQPATPKGFTHLNQMVATSMSSPGLRPHSQSQVPTTY |
| | | LHVESVSRILNGTTGTCQRSRAPAYDSLQQDIHQGNKYILSHEISNGNGCKK |
| | | ALPQNSSLPTPIMAKLEEARGSKRQYHRAMGQTEKHDLNLAQQIAQSQDV |
| | | ERHNSSTCVEYLDAAKKTKIQKVVQENLHGMPPEVIEIEDDPTDGARKGKN |
| | | TASISKGASKGNSSPVKKTAEKEKCIVPKTPAKKGRAGRKKSVPPPAHASEI |
| | | QLWQPTPPKTPLSRSKPKGKGRKSIQDSGKARGPSGELLCQDSIAEIIYRMQ |
| | | NLYLGDKEREQEQNAMVLYKGDGALVPYESKKRKPRPKVDIDDETTRIWN |
| | | LLMGKGDEKEGDEEKDKKKEKWWEEERRVFRGRADSFIARMHLVQGDRR |
| | | FSPWKGSVVDSVIGVFLTQNVSDHLSSSAFMSLAARFPPKLSSSREDERNVR |
| | | SVVVEDPEGCILNLNEIPSWQEKVQHPSDMEVSGVDSGSKEQLRDCSNSGIE |
| | | RFNFLEKSIQNLEEEVLSSQDSFDPAIFQSCGRVGSCSCSKSDAEFPTTRCET |
| | | KTVSGTSQSVQTGSPNLSDEICLQGNERPHLYEGSGDVQKQETTNVAQKKP |
| | | DLEKTMNWKDSVCFGQPRNDTNWQTTPSSSYEQCATRQPHVLDIEDFGMQ |
| | | GEGLGYSWMSISPRVDRVKNKNVPRRFFRQGGSVPREFTGQIIPSTPHELPG |
| | | MGLSGSSSAVQEHQDDTQHNQQDEMNKASHLQKTFLDLLNSSEECLTRQS |
| | | STKQNITDGCLPRDRTAEDVVDPLSNNSSLQNILVESNSSNKEQTAVEYKET |
| | | NATILREMKGTLADGKKPTSQWDSLRKDVEGNEGRQERNKNNMDSIDYEA |
| | | IRRASISEISEAIKERGMNNMLAVRIKDFLERIVKDHGGIDLEWLRESPPDKA |
| | | KDYLLSIRGLGLKSVECVRLLTLHNLAFPVDTNVGRIAVRMGWVPLQPLPE |
| | | SLQLHLLELYPVLESIQKFLWPRLCKLDQRTLYELHYQLITFGKVFCTKSRP |
| | | NCNACPMRGECRHFASAYASARLALPAPEERSLTSATIPVPPESYPPVAIPMI |
| | | ELPLPLEKSLASGAPSNRENCEPIIEEPASPGQECTEITESDIEDAYYNEDPDEI |
| | | PTIKLNIEQFGMTLREHMERNMELQEGDMSKALVALHPTTTSIPTPKLKNIS |
| | | RLRTEHQVYELPDSHRLLDGMDKREPDDPSPYLLAIWTPGETANSAQPPEQ |
| | | KCGGKASGKMCFDETCSECNSLREANSQTVRGTLLIPCRTAMRGSFPLNGT |
| | | YFQVNELFADHESSLKPIDVPRDWIWDLPRRTVYFGTSVTSIFRGLSTEQIQF |
| | | CFWKGFVCVRGFEQKTRAPRPLMARLHFPASKLKNNKT |
| 605 | arabidopsis | MEVEGEVREKEARVKGRQPETEVLHGLPQEQSIFNNMQHNHQPDSDRRRL |
| | DML2 | SLENLPGLYNMSCTQLLALANATVATGSSIGASSSSLSSQHPTDSWINSWK |
| | | MDSNPWTLSKMQKQQYDVSTPQKFLCDLNLTPEELVSTSTQRTEPESPQITL |
| | | KTPGKSLSETDHEPHDRIKKSVLGTGSPAAVKKRKIARNDEKSQLETPTLKR |
| | | KKIRPKVVREGKTKKASSKAGIKKSSIAATATKTSEESNYVRPKRLTRRSIRF |
| | | DFDLQEEDEEFCGIDFTSAGHVEGSSGEENLTDTTLGMFGHVPKGRRGQRR |
| | | SNGFKKTDNDCLSSMLSLVNTGPGSFMESEEDRPSDSQISLGRQRSIMATRP |
| | | RNFRSLKKLLQRIIPSKRDRKGCKLPRGLPKLTVASKLQLKVFRKKRSQRNR |
| | | VASQFNARILDLQWRRQNPTGTSLADIWERSLTIDAITKLFEELDINKEGLCL |
| | | PHNRETALILYKKSYEEQKAIVKYSKKQKPKVQLDPETSRVWKLLMSSIDC |
| | | DGVDGSDEEKRKWWEEERNMFHGRANSFIARMRVVQGNRTFSPWKGSVV |
| | | DSVVGVFLTQNVADHSSSSAYMDLAAEFPVEWNFNKGSCHEEWGSSVTQE |
| | | TILNLDPRTGVSTPRIRNPTRVIIEEIDDDENDIDAVCSQESSKTSDSSITSADQ |
| | | SKTMLLDPFNTVLMNEQVDSQMVKGKGHIPYTDDLNDLSQGISMVSSAST |
| | | HCELNLNEVPPEVELCSHQQDPESTIQTQDQQESTRTEDVKKNRKKPTTSKP |
| | | KKKSKESAKSTQKKSVDWDSLRKEAESGGRKRERTERTMDTVDWDALRC |
| | | TDVHKIANIIIKRGMNNMLAERIKAFLNRLVKKHGSIDLEWLRDVPPDKAK |
| | | EYLLSINGLGLKSVECVRLLSLHQIAFPVDTNVGRIAVRLGWVPLQPLPDEL |
| | | QMHLLELYPVLESVQKYLWPRLCKLDQKTLYELHYHMITFGKVFCTKVKP |
| | | NCNACPMKAECRHYSSARASARLALPEPEESDRTSVMIHERRSKRKPVVVN |
| | | FRPSLFLYQEKEQEAQRSQNCEPIIEEPASPEPEYIEHDIEDYPRDKNNVGTSE |
| | | DPWENKDVIPTIILNKEAGTSHDLVVNKEAGTSHDLVVLSTYAAAIPRRKLK |
| | | IKEKLRTEHHVFELPDHHSILEGFERREAEDIVPYLLAIWTPGETVNSIQPPK |
| | | QRCALFESNNTLCNENKCFQCNKTREEESQTVRGTILIPCRTAMRGGFPLNG |
| | | TYFQTNEVFADHDSSINPIDVPTELIWDLKRRVAYLGSSVSSICKGLSVEAIK |
| | | YNFQEGYVCVRGFDRENRKPKSLVKRLHCSHVAIRTKEKTEE |
| 606 | arabidopsis | MLTDGSQHTYQNGETKNSKEHERKCDESAHLQDNSQTTHKKKEKKNSKE |
| | DML3 | KHGIKHSESEHLQDDISQRVTGKGRRRNSKGTPKKLRFNRPRILEDGKKPRN |
| | | PATTRLRTISNKRRKKDIDSEDEVIPELATPTKESFPKRRKNEKIKRSVARTL |
| | | NFKQEIVLSCLEFDKICGPIFPRGKKRTTTRRRYDFLCFLLPMPVWKKQSRR |
| | | SKRRKNMVRWARIASSSKLLEETLPLIVSHPTINGQADASLHIDDTLVRHVV |
| | | SKQTKKSANNVIEHLNRQITYQKDHGLSSLADVPLHIEDTLIKSASSVLSERP |
| | | IKKTKDIAKLIKDMGRLKINKKVTTMIKADKKLVTAKVNLDPETIKEWDVL |
| | | MVNDSPSRSYDDKETEAKWKKEREIFQTRIDLFINRMHRLQGNRKFKQWK |
| | | GSVVDSVVGVFLTQNTTDYLSSNAFMSVAAKFPVDAREGLSYYIEEPQDAK |
| | | SSECIILSDESISKVEDHENTAKRKNEKTGIIEDEIVDWNNLRRMYTKEGSRP |
| | | EMHMDSVNWSDVRLSGQNVLETTIKKRGQFRILSERILKFLNDEVNQNGNI |
| | | DLEWLRNAPSHLVKRYLLEIEGIGLKSAECVRLLGLKHHAFPVDTNVGRIA |
| | | VRLGLVPLEPLPNGVQMHQLFEYPSMDSIQKYLWPRLCKLPQETLYELHYQ |
| | | MITFGKVFCTKTIPNCNACPMKSECKYFASAYVSSKVLLESPEEKMHEPNTF |
| | | MNAHSQDVAVDMTSNINLVEECVSSGCSDQAICYKPLVEFPSSPRAEIPEST |
| | | DIEDVPFMNLYQSYASVPKIDFDLDALKKSVEDALVISGRMSSSDEEISKAL |
| | | VIPTPENACIPIKPPRKMKYYNRLRTEHVVYVLPDNHELLHDFERRKLDDPS |
| | | PYLLAIWQPGETSSSFVPPKKKCSSDGSKLCKIKNCSYCWTIREQNSNIFRGT |
| | | ILIPCRTAMRGAFPLNGTYFQTNEVFADHETSLNPIVFRRELCKGLEKRALY |
| | | CGSTVTSIFKLLDTRRIELCFWTGFLCLRAFDRKQRDPKELVRRLHTPPDER |
| | | GPKFMSDDDI |
| 607 | Herpes | MDLLVDELFADMNADGASPPPPRPAGGPKNTPAAPPLYATGRLSQAQLMP |
| | strain 17 | SPPMPVPPAALFNRLLDDLGFSAGPALCTMLDTWNEDLFSALPTNADLYRE |
| | VP16 | CKFLSTLPSDVVEWGDAYVPERTQIDIRAHGDVAFPTLPATRDGLGLYYEA |
| | | LSRFFHAELRAREESYRTVLANFCSALYRYLRASVRQLHRQAHMRGRDRD |
| | | LGEMLRATIADRYYRETARLARVLFLHLYLFLTREILWAAYAEQMMRPDL |
| | | FDCLCCDLESWRQLAGLFQPFMFVNGALTVRGVPIEARRLRELNHIREHLN |
| | | LPLVRSAATEEPGAPLTTPPTLHGNQARASGYFMVLIRAKLDSYSSFTTSPSE |
| | | AVMREHAYSRARTKNNYGSTIEGLLDLPDDDAPEEAGLAAPRLSFLPAGHT |
| | | RRLSTAPPTDVSLGDELHLDGEDVAMAHADALDDFDLDMLGDGDSPGPGF |
| | | TPHDSAPYGALDMADFEFEQMFTDALGIDEYGG |
| 608 | Herpes | DALDDFDLDMLGSDALDDFDLDMLGSDALDDFDLDMLGSDALDDFDLDM |
| | strain 17 | |
| | VP64 | |
| 609 | Herpes | DALDDFDLDMLGSDALDDFDLDMLGSDALDDFDLDMLGSDALDDFDLDM |
| | strain 17 | LGSDALDDFDLDMLGSSDALDDFDLDMLGSDALDDFDLDMLGSDALDDF |
| | VP160 | DLDMLGSDALDDFDLDMLGSDALDDFDLDML |
| 610 | human | MEGAGGANDKKKISSERRKEKSRDAARSRRSKESEVFYELAHQLPLPHNVS |
| | HIF1alpha | SHLDKASVMRLTISYLRVRKLLDAGDLDIEDDMKAQMNCFYLKALDGFV |
| | | MVLTDDGDMIYISDNVNKYMGLTQFELTGHSVFDFTHPCDHEEMREMLTH |
| | | RNGLVKKGKEQNTQRSFFLRMKCTLTSRGRTMNIKSATWKVLHCTGHIHV |
| | | YDTNSNQPQCGYKKPPMTCLVLICEPIPHPSNIEIPLDSKTFLSRHSLDMKFS |
| | | YCDERITELMGYEPEELLGRSIYEYYHALDSDHLTKTHHDMFTKGQVTTGQ |
| | | YRMLAKRGGYVWVETQATVIYNTKNSQPQCIVCVNYVVSGIIQHDLIFSLQ |
| | | QTECVLKPVESSDMKMTQLFTKVESEDTSSLFDKLKKEPDALTLLAPAAGD |
| | | TIISLDFGSNDTETDDQQLEEVPLYNDVMLPSPNEKLQNINLAMSPLPTAETP |
| | | KPLRSSADPALNQEVALKLEPNPESLELSFTMPQIQDQTPSPSDGSTRQSSPE |
| | | PNSPSEYCFYVDSDMVNEFKLELVEKLFAEDTEAKNPFSTQDTDLDLEMLA |
| | | PYIPMDDDFQLRSFDQLSPLESSSASPESASPQSTVTVFQQTQIQEPTANATT |
| | | TTATTDELKTVTKDRMEDIKILIASPSPTHIHKETTSATSSPYRDTQSRTASPN |
| | | RAGKGVIEQTEKSHPRSPNVLSVALSQRTTVPEEELNPKILALQNAQRKRK |
| | | MEHDGSLFQAVGIGTLLQQPDDHAATTSLSWKRVKGCKSSEQNGMEQKTII |
| | | LIPSDLACRLLGQSMDESGLPQLTSYDCEVNAPIQGSRNLLQGEELLRALDQ |
| | | VN |
| 611 | human | MADHMMAMNHGRFPDGTNGLHHHPAHRMGMGQFPSPHHHQQQQPQHA |
| | CITED2 | FNALMGEHIHYGAGNMNATSGIRHAMGPGTVNGGHPPSALAPAARFNNSQ |
| | | FMGPPVASQGGSLPASMQLQKLNNQYFNHHPYPHNHYMPDLHPAAGHQM |
| | | NGTNQHFRDCNPKHSGGSSTPGGSGGSSTPGGSGSSSGGGAGSSNSGGGSG |
| | | SGNMPASVAHVPAAMLPPNVIDTDFIDEEVLMSLVIEMGLDRIKELPELWL |
| | | GQNEFDFMTDFVCKQQPSRVSC |
| 612 | human | MAQWNQLQQLDTRYLEQLHQLYSDSFPMELRQFLAPWIESQDWAYAASK |
| | Stat3 | ESHATLVFHNLLGEIDQQYSRFLQESNVLYQHNLRRIKQFLQSRYLEKPMEI |
| | | ARIVARCLWEESRLLQTAATAAQQGGQANHPTAAVVTEKQQMLEQHLQD |
| | | VRKRVQDLEQKMKVVENLQDDFDFNYKTLKSQGDMQDLNGNNQSVTRQ |
| | | KMQQLEQMLTALDQMRRSIVSELAGLLSAMEYVQKTLTDEELADWKRRQ |
| | | QIACIGGPPNICLDRLENWITSLAESQLQTRQQIKKLEELQQKVSYKGDPIVQ |
| | | HRPMLEERIVELFRNLMKSAFVVERQPCMPMHPDRPLVIKTGVQFTTKVRL |
| | | LVKFPELNYQLKIKVCIDKDSGDVAALRGSRKFNILGTNTKVMNMEESNNG |
| | | SLSAEFKHLTLREQRCGNGGRANCDASLIVTEELHLITFETEVYHQGLKIDL |
| | | ETHSLPVVVISNICQMPNAWASILWYNMLTNNPKNVNFFTKPPIGTWDQVA |
| | | EVLSWQFSSTTKRGLSIEQLTTLAEKLLGPGVNYSGCQITWAKFCKENMAG |
| | | KGFSFWVWLDNIIDLVKKYILALWNEGYIMGFISKERERAILSTKPPGTFLLR |
| | | FSESSKEGGVTFTWVEKDISGKTQIQSVEPYTKQQLNNMSFAEIIMGYKIMD |
| | | ATNILVSPLVYLYPDIPKEEAFGKYCRPESQEHPEADPGSAAPYLKTKFICVT |
| | | PTTCSNTIDLPMSPRTLDSLMQFGNNGEGAEPSAGGQFESLTFDMELTSECA |
| | | TSPM |
| 613 | human p65 | MDELFPLIFPAEPAQASGPYVEIIEQPKQRGMRFRYKCEGRSAGSIPGERSTD |
| | | TTKTHPTIKINGYTGPGTVRISLVTKDPPHRPHPHELVGKDCRDGFYEAELC |
| | | PDRCIHSFQNLGIQCVKKRDLEQAISQRIQTNNNPFQVPIEEQRGDYDLNAV |
| | | RLCFQVTVRDPSGRPLRLPPVLSHPIFDNRAPNTAELKICRVNRNSGSCLGG |
| | | DEIFLLCDKVQKEDIEVYFTGPGWEARGSFSQADVHRQVAIVFRTPPYADPS |
| | | LQAPVRVSMQLRRPSDRELSEPMEFQYLPDTDDRHRIEEKRKRTYETFKSIM |
| | | KKSPFSGPTDPRPPPRRIAVPSRSSASVPKPAPQPYPFTSSLSTINYDEFPTMV |
| | | FPSGQISQASALAPAPPQVLPQAPAPAPAPAMVSALAQAPAPVPVLAPGPPQ |
| | | AVAPPAPKPTQAGEGTLSEALLQLQFDDEDLGALLGNSTDPAVFTDLASVD |
| | | NSEFQQLLNQGIPVAPHTTEPMLMEYPEAITRLVTGAQRPPDPAPAPLGAPG |
| | | LPNGLLSGDEDFSSIADMDFSALLSQISS |
| 614 | human p53 | MEEPQSDPSVEPPLSQETFSDLWKLLPENNVLSPLPSQAMDDLMLSPDDIEQ |
| | | WFTEDPGPDEAPRMPEAAPPVAPAPAAPTPAAPAPAPSWPLSSSVPSQKTY |
| | | QGSYGFRLGFLHSGTAKSVTCTYSPALNKMFCQLAKTCPVQLWVDSTPPPG |
| | | TRVRAMAIYKQSQHMTEVVRRCPHHERCSDSDGLAPPQHLIRVEGNLRVE |
| | | YLDDRNTFRHSVVVPYEPPEVGSDCTTIHYNYMCNSSCMGGMNRRPILTIIT |
| | | LEDSSGNLLGRNSFEVRVCACPGRDRRTEEENLRKKGEPHHELPPGSTKRA |
| | | LPNNTSSSPQPKKKPLDGEYFTLQIRGRERFEMFRELNEALELKDAQAGKEP |
| | | GGSRAHSSHLKSKKGQSTSRHKKLMFKTEGPDSD |
| 615 | human | MAEEFVTLKDVGMDFTLGDWEQLGLEQGDTFWDTALDNCQDLFLLDPPR |
| | ZNF473 | PNLTSHPDGSEDLEPLAGGSPEATSPDVTETKNSPLMEDFFEEGFSQEIIEML |
| | | SKDGFWNSNFGEACIEDTWLDSLLGDPESLLRSDIATNGESPTECKSHELKR |
| | | GLSPVSTVSTGEDSMVHNVSEKTLTPAKSKEYRGEFFSYSDHSQQDSVQEG |
| | | EKPYQCSECGKSFSGSYRLTQHWITHTREKPTVHQECEQGFDRNASLSVYP |
| | | KTHTGYKFYVCNEYGTTFSQSTYLWHQKTHTGEKPCKSQDSDHPPSHDTQ |
| | | PGEHQKTHTDSKSYNCNECGKAFTRIFHLTRHQKIHTRKRYECSKCQATFN |
| | | LRKHLIQHQKTHAAKTTSECQECGKIFRHSSLLIEHQALHAGEEPYKCNERG |
| | | KSFRHNSTLKIHQRVHSGEKPYKCSECGKAFHRHTHLNEHRRIHTGYRPHK |
| | | CQECVRSFSRPSHLMRHQAIHTAEKPYSCAECKETFSDNNRLVQHQKMHT |
| | | VKTPYECQECGERFICGSTLKCHESVHAREKQGFFVSGKILDQNPEQKEKCF |
| | | KCNKCEKTFSCSKYLTQHERIHTRGVKPFECDQCGKAFGQSTRLIHHQRIHS |
| | | RVRLYKWGEQGKAISSASLIKLQSFHTKEHPFKCNECGKTFSHSAHLSKHQ |
| | | LIHAGENPFKCSKCDRVFTQRNYLVQHERTHARKKPLVCNECGKTFRQSSC |
| | | LSKHQRIHSGEKPYVCDYCGKAFGLSAELVRHQRIHTGEKPYVCQECGKAF |
| | | TQSSCLSIHRRVHTGEKPYRCGECGKAFAQKANLTQHQRIHTGEKPYSCNV |
| | | CGKAFVLSAHLNQHLRVHTQETLYQCQRCQKAFRCHSSLSRHQRVHNKQQ |
| | | YCL |
| 616 | human | MAEAPQVVEIDPDFEPLPRPRSCTWPLPRPEFSQSNSATSSPAPSGSAAANPD |
| | FOXO1 | AAAGLPSASAAAVSADFMSNLSLLEESEDFPQAPGSVAAAVAAAAAAAAT |
| | | GGLCGDFQGPEAGCLHPAPPQPPPPGPLSQHPPVPPAAAGPLAGQPRKSSSS |
| | | RRNAWGNLSYADLITKAIESSAEKRLTLSQIYEWMVKSVPYFKDKGDSNSS |
| | | AGWKNSIRHNLSLHSKFIRVQNEGTGKSSWWMLNPEGGKSGKSPRRRAAS |
| | | MDNNSKFAKSRSRAAKKKASLQSGQEGAGDSPGSQFSKWPASPGSHSNDD |
| | | FDNWSTFRPRTSSNASTISGRLSPIMTEQDDLGEGDVHSMVYPPSAAKMAS |
| | | TLPSLSEISNPENMENLLDNLNLLSSPTSLTVSTQSSPGTMMQQTPCYSFAPP |
| | | NTSLNSPSPNYQKYTYGQSSMSPLPQMPIQTLQDNKSSYGGMSQYNCAPGL |
| | | LKELLTSDSPPHNDIMTPVDPGVAQPNSRVLGQNVMMGPNSVMSTYGSQA |
| | | SHNKMMNPSSHTHPGHAQQTSAVNGRPLPHTVSTMPHTSGMNRLTQVKTP |
| | | VQVPLPHPMQMSALGGYSSVSSCNGYGRMGLLHQEKLPSDLDGMFIERLD |
| | | CDMESIIRNDLMDGDTLDFNFDNVLPNQSFPHSVKTTTHSWVSG |
| 617 | human | MARRPRHSIYSSDEDDEDFEMCDHDYDGLLPKSGKRHLGKTRWTREEDEK |
| | Myb | LKKLVEQNGTDDWKVIANYLPNRTDVQCQHRWQKVLNPELIKGPWTKEE |
| | | DQRVIELVQKYGPKRWSVIAKHLKGRIGKQCRERWHNHLNPEVKKTSWTE |
| | | EEDRIIYQAHKRLGNRWAEIAKLLPGRTDNAIKNHWNSTMRRKVEQEGYL |
| | | QESSKASQPAVATSFQKNSHLMGFAQAPPTAQLPATGQPTVNNDYSYYHIS |
| | | EAQNVSSHVPYPVALHVNIVNVPQPAAAAIQRHYNDEDPEKEKRIKELELL |
| | | LMSTENELKGQQVLPTQNHTCSYPGWHSTTIADHTRPHGDSAPVSCLGEHH |
| | | STPSLPADPGSLPEESASPARCMIVHQGTILDNVKNLLEFAETLQFIDSFLNTS |
| | | SNHENSDLEMPSLTSTPLIGHKLTVTTPFHRDQTVKTQKENTVFRTPAIKRSI |
| | | LESSPRTPTPFKHALAAQEIKYGPLKMLPQTPSHLVEDLQDVIKQESDESGIV |
| | | AEFQENGPPLLKKIKQEVESPTDKSGNFFCSHHWEGDSLNTQLFTQTSPVAD |
| | | APNILTSSVLMAPASEDEDNVLKAFTVPKNRSLASPLQATKAQRLFQF |
| 618 | human | MATSNNPRKFSEKIALHNQKQAEETAAFEEVMKDLSLTRAARLQLQKSQY |
| | CRTC1 | LQLGPSRGQYYGGSLPNVNQIGSGTMDLPFQTPFQSSGLDTSRTTRHHGLV |
| | | DRVYRERGRLGSPHRRPLSVDKHGRQADSCPYGTMYLSPPADTSWRRTNS |
| | | DSALHQSTMTPTQPESFSSGSQDVHQKRVLLLTVPGMEETTSEADKNLSKQ |
| | | AWDTKKTGSRPKSCEVPGINIFPSADQENTTALIPATHNTGGSLPDLTNIHFP |
| | | SPLPTPLDPEEPTFPALSSSSSTGNLAANLTHLGIGGAGQGMSTPGSSPQHRP |
| | | AGVSPLSLSTEARRQQASPTLSPLSPITQAVAMDALSLEQQLPYAFFTQAGS |
| | | QQPPPQPQPPPPPPPASQQPPPPPPPQAPVRLPPGGPLLPSASLTRGPQPPPLA |
| | | VTVPSSLPQSPPENPGQPSMGIDIASAPALQQYRTSAGSPANQSPTSPVSNQG |
| | | FSPGSSPQHTSTLGSVFGDAYYEQQMAARQANALSHQLEQFNMMENAISSS |
| | | SLYSPGSTLNYSQAAMMGLTGSHGSLPDSQQLGYASHSGIPNIILTVTGESPP |
| | | SLSKELTSSLAGVGDVSFDSDSQFPLDELKIDPLTLDGLHMLNDPDMVLADP |
| | | ATEDTFRMDRL |
| 619 | human | MASAGVAAGRQAEDVLPPTSDQPLPDTKPLPPPQPPPVPAPQPQQSPAPRPQ |
| | Med9 | SPARAREEENYSFLPLVHNIIKCMDKDSPEVHQDLNALKSKFQEMRKLISTM |
| | | PGIHLSPEQQQQQLQSLREQVRTKNELLQKYKSLCMFEIPKE |
| 620 | human | MTGKLAEKLPVTMSSLLNQLPDNLYPEEIPSALNLFSGSSDSVVHYNQMAT |
| | EGR3 | ENVMDIGLTNEKPNPELSYSGSFQPAPGNKTVTYLGKFAFDSPSNWCQDNII |
| | | SLMSAGILGVPPASGALSTQTSTASMVQPPQGDVEAMYPALPPYSNCGDLY |
| | | SEPVSFHDPQGNPGLAYSPQDYQSAKPALDSNLFPMIPDYNLYHHPNDMGS |
| | | IPEHKPFQGMDPIRVNPPPITPLETIKAFKDKQIHPGFGSLPQPPLTLKPIRPRK |
| | | YPNRPSKTPLHERPHACPAEGCDRRFSRSDELTRHLRIHTGHKPFQCRICMR |
| | | SFSRSDHLTTHIRTHTGEKPFACEFCGRKFARSDERKRHAKIHLKQKEKKAE |
| | | KGGAPSASSAPPVSLAPVVTTCA |
| 621 | human | MSTPTDPGAMPHPGPSPGPGPSPGPILGPSPGPGPSPGSVHSMMGPSPGPPSV |
| | SMARCA2 | SHPMPTMGSTDFPQEGMHQMHKPIDGIHDKGIVEDIHCGSMKGTGMRPPHP |
| | | GMGPPQSPMDQHSQGYMSPHPSPLGAPEHVSSPMSGGGPTPPQMPPSQPGA |
| | | LIPGDPQAMSQPNRGPSPFSPVQLHQLRAQILAYKMLARGQPLPETLQLAV |
| | | QGKRTLPGLQQQQQQQQQQQQQQQQQQQQQQQPQQQPPQPQTQQQQQP |
| | | ALVNYNRPSGPGPELSGPSTPQKLPVPAPGGRPSPAPPAAAQPPAAAVPGPS |
| | | VPQPAPGQPSPVLQLQQKQSRISPIQKPQGLDPVEILQEREYRLQARIAHRIQ |
| | | ELENLPGSLPPDLRTKATVELKALRLLNFQRQLRQEVVACMRRDTTLETAL |
| | | NSKAYKRSKRQTLREARMTEKLEKQQKIEQERKRRQKHQEYLNSILQHAK |
| | | DFKEYHRSVAGKIQKLSKAVATWHANTEREQKKETERIEKERMRRLMAED |
| | | EEGYRKLIDQKKDRRLAYLLQQTDEYVANLTNLVWEHKQAQAAKEKKKR |
| | | RRRKKKAEENAEGGESALGPDGEPIDESSQMSDLPVKVTHTETGKVLFGPE |
| | | APKASQLDAWLEMNPGYEVAPRSDSEESDSDYEEEDEEEESSRQETEEKILL |
| | | DPNSEEVSEKDAKQIIETAKQDVDDEYSMQYSARGSQSYYTVAHAISERVE |
| | | KQSALLINGTLKHYQLQGLEWMVSLYNNNLNGILADEMGLGKTIQTIALIT |
| | | YLMEHKRLNGPYLIIVPLSTLSNWTYEFDKWAPSVVKISYKGTPAMRRSLV |
| | | PQLRSGKFNVLLTTYEYIIKDKHILAKIRWKYMIVDEGHRMKNHHCKLTQV |
| | | LNTHYVAPRRILLTGTPLQNKLPELWALLNFLLPTIFKSCSTFEQWFNAPFA |
| | | MTGERVDLNEEETILIIRRLHKVLRPFLLRRLKKEVESQLPEKVEYVIKCDM |
| | | SALQKILYRHMQAKGILLTDGSEKDKKGKGGAKTLMNTIMQLRKICNHPY |
| | | MFQHIEESFAEHLGYSNGVINGAELYRASGKFELLDRILPKLRATNHRVLLF |
| | | CQMTSLMTIMEDYFAFRNFLYLRLDGTTKSEDRAALLKKFNEPGSQYFIFLL |
| | | STRAGGLGLNLQAADTVVIFDSDWNPHQDLQAQDRAHRIGQQNEVRVLRL |
| | | CTVNSVEEKILAAAKYKLNVDQKVIQAGMFDQKSSSHERRAFLQAILEHEE |
| | | ENEEEDEVPDDETLNQMIARREEEFDLFMRMDMDRRREDARNPKRKPRLM |
| | | EEDELPSWIIKDDAEVERLTCEEEEEKIFGRGSRQRRDVDYSDALTEKQWLR |
| | | AIEDGNLEEMEEEVRLKKRKRRRNVDKDPAKEDVEKAKKRRGRPPAEKLS |
| | | PNPPKLTKQMNAIIDTVINYKDRCNVEKVPSNSQLEIEGNSSGRQLSEVFIQL |
| | | PSRKELPEYYELIRKPVDFKKIKERIRNHKYRSLGDLEKDVMLLCHNAQTFN |
| | | LEGSQIYEDSIVLQSVFKSARQKIAKEEESEDESNEEEEEEDEEESESEAKSV |
| | | KVKIKLNKKDDKGRDKGKGKKRPNRGKAKPVVSDFDSDEEQDEREQSEGS |
| | | GTDDE |
| 622 | human | MEPEQMLEGQTQVAENPHSEYGLTDNVERIVENEKINAEKSSKQKVDLQSL |
| | Dpy30 | PTRAYLDQTVVPILLQGLAVLAKERPPNPIEFLASYLLKNKAQFEDRN |
| 623 | human | MSGLGENLDPLASDSRKRKLPCDTPGQGLTCSGEKRRREQESKYIEELAELI |
| | NCOA3 | SANLSDIDNFNVKPDKCAILKETVRQIRQIKEQGKTISNDDDVQKADVSSTG |
| | | QGVIDKDSLGPLLLQALDGFLFVVNRDGNIVFVSENVTQYLQYKQEDLVNT |
| | | SVYNILHEEDRKDFLKNLPKSTVNGVSWTNETQRQKSHTFNCRMLMKTPH |
| | | DILEDINASPEMRQRYETMQCFALSQPRAMMEEGEDLQSCMICVARRITTG |
| | | ERTFPSNPESFITRHDLSGKVVNIDTNSLRSSMRPGFEDIIRRCIQRFFSLNDG |
| | | QSWSQKRHYQEAYLNGHAETPVYRFSLADGTIVTAQTKSKLFRNPVTNDR |
| | | HGFVSTHFLQREQNGYRPNPNPVGQGIRPPMAGCNSSVGGMSMSPNQGLQ |
| | | MPSSRAYGLADPSTTGQMSGARYGGSSNIASLTPGPGMQSPSSYQNNNYGL |
| | | NMSSPPHGSPGLAPNQQNIMISPRNRGSPKIASHQFSPVAGVHSPMASSGNT |
| | | GNHSFSSSSLSALQAISEGVGTSLLSTLSSPGPKLDNSPNMNITQPSKVSNQD |
| | | SKSPLGFYCDQNPVESSMCQSNSRDHLSDKESKESSVEGAENQRGPLESKG |
| | | HKKLLQLLTCSSDDRGHSSLTNSPLDSSCKESSVSVTSPSGVSSSTSGGVSST |
| | | SNMHGSLLQEKHRILHKLLQNGNSPAEVAKITAEATGKDTSSITSCGDGNV |
| | | VKQEQLSPKKKENNALLRYLLDRDDPSDALSKELQPQVEGVDNKMSQCTS |
| | | STIPSSSQEKDPKIKTETSEEGSGDLDNLDAILGDLTSSDFYNNSISSNGSHLG |
| | | TKQQVFQGTNSLGLKSSQSVQSIRPPYNRAVSLDSPVSVGSSPPVKNISAFP |
| | | MLPKQPMLGGNPRMMDSQENYGSSMGGPNRNVTVTQTPSSGDWGLPNSK |
| | | AGRMEPMNSNSMGRPGGDYNTSLPRPALGGSIPTLPLRSNSIPGARPVLQQQ |
| | | QQMLQMRPGEIPMGMGANPYGQAAASNQLGSWPDGMLSMEQVSHGTQN |
| | | RPLLRNSLDDLVGPPSNLEGQSDERALLDQLHTLLSNTDATGLEEIDRALGI |
| | | PELVNQGQALEPKQDAFQGQEAAVMMDQKAGLYGQTYPAQGPPMQGGF |
| | | HLQGQSPSFNSMMNQMNQQGNFPLQGMHPRANIMRPRTNTPKQLRMQLQ |
| | | QRLQGQQFLNQSRQALELKMENPTAGGAAVMRPMMQPQVSSQQGFLNAQ |
| | | MVAQRSRELLSHHFRQQRVAMMMQQQQQQQQQQQQQQQQQQQQQQQQ |
| | | QQQQQTQAFSPPPNVTASPSMDGLLAGPTMPQAPPQQFPYQPNYGMGQQP |
| | | DPAFGRVSSPPNAMMSSRMGPSQNPMMQHPQAASIYQSSEMKGWPSGNLA |
| | | RNSSFSQQQFAHQGNPAVYSMVHMNGSSGHMGQMNMNPMPMSGMPMGP |
| | | DQKYC |
| 624 | human | MRGAASASVREPTPLPGRGAPRTKPRAGRGPTVGTPATLALPARGRPRSRN |
| | ZFP28 | GLASKGQRGAAPTGPGHRALPSRDTALPQERNKKLEAVGTGIEPKAMSQG |
| | | LVTFGDVAVDFSQEEWEWLNPIQRNLYRKVMLENYRNLASLGLCVSKPDV |
| | | ISSLEQGKEPWTVKRKMTRAWCPDLKAVWKIKELPLKKDFCEGKLSQAVIT |
| | | ERLTSYNLEYSLLGEHWDYDALFETQPGLVTIKNLAVDFRQQLHPAQKNFC |
| | | KNGIWENNSDLGSAGHCVAKPDLVSLLEQEKEPWMVKRELTGSLFSGQRS |
| | | VHETQELFPKQDSYAEGVTDRTSNTKLDCSSFRENWDSDYVFGRKLAVGQ |
| | | ETQFRQEPITHNKTLSKERERTYNKSGRWFYLDDSEEKVHNRDSIKNFQKSS |
| | | VVIKQTGIYAGKKLFKCNECKKTFTQSSSLTVHQRIHTGEKPYKCNECGKA |
| | | FSDGSSFARHQRCHTGKKPYECIECGKAFIQNTSLIRHWRYYHTGEKPFDCI |
| | | DCGKAFSDHIGLNQHRRIHTGEKPYKCDVCHKSFRYGSSLTVHQRIHTGEK |
| | | PYECDVCRKAFSHHASLTQHQRVHSGEKPFKCKECGKAFRQNIHLASHLRI |
| | | HTGEKPFECAECGKSFSISSQLATHQRIHTGEKPYECKVCSKAFTQKAHLAQ |
| | | HQKTHTGEKPYECKECGKAFSQTTHLIQHQRVHTGEKPYKCMECGKAFGD |
| | | NSSCTQHQRLHTGQRPYECIECGKAFKTKSSLICHRRSHTGEKPYECSVCGK |
| | | AFSHRQSLSVHQRIHSGKKPYECKECRKTFIQIGHLNQHKRVHTGERSYNY |
| | | KKSRKVFRQTAHLAHHQRIHTGESSTCPSLPSTSNPVDLFPKFLWNPSSLPSP |
| 625 | human | MPTALCPRVLAPKESEEPRKMRSPPGENPSPQGELPSPESSRRLFRRFRYQEA |
| | ZNF496 | AGPREALQRLWDLCGGWLRPERHTKEQILELLVLEQFLAILPREIQSWVRA |
| | | QEPESGEQAVAAVEALEREPGRPWQWLKHCEDPVVIDDGDSPLDQEQEQL |
| | | PVEPHSDLAKNQDAQPITLAQCLGLPSRPPSQLSGDPVLQDAFLLQEENVRD |
| | | TQQVTTLQLPPSRVSPFKDMILCFSEEDWSLLDPAQTGFYGEFIIGEDYGVS |
| | | MPPNDLAAQPDLSQGEENEPRVPELQDLQGKEVPQVSYLDSPSLQPFQVEE |
| | | RRKREELQVPEFQACPQTVVPQNTYPAGGNPRSLENSLDEEVTIEIVLSSSG |
| | | DEDSQHGPYCTEELGSPTEKQRSLPASHRSSTEAGGEVQTSKKSYVCPNCG |
| | | KIFRWRVNFIRHLRSRREQEKPHECSVCGELFSDSEDLDGHLESHEAQKPYR |
| | | CGACGKSFRLNSHLLSHRRIHLQPDRLQPVEKREQAASEDADKGPKEPLEN |
| | | GKAKLSFQCCECGKAFQRHDHLARHRSHFHLKDKARPFQCRYCVKSFTQN |
| | | YDLLRHERLHMKRRSKQALNSY |
| 626 | human | MASMPPTPEAQGPILFEDLAVYFSQEECVTLHPAQRSLSKDGTKESLEDAAL |
| | ZNF597 | MGEEGKPEINQQLSLESMELDELALEKYPIAAPLVPYPEKSSEDGVGNPEAK |
| | | ILSGTPTYKRRVISLLVTIENHTPLVELSEYLGTNTLSEILDSPWEGAKNVYK |
| | | CPECDQNFSDHSYLVLHQKIHSGEKKHKCGDCGKIFNHRANLRTHRRIHTG |
| | | EKPYKCAKCSASFRQHSHLSRHMNSHVKEKPYTCSICGRGFMWLPGLAQH |
| | | QKSHSAENTYESTNCDKHFNEKPNLALPEETFVSGPQYQHTKCMKSFRQSL |
| | | YPALSEKSHDEDSERCSDDGDNFFSFSKFKPLQCPDCDMTFPCFSELISHQNI |
| | | HTEERPHKCKTCEESFALDSELACHQKSHMLAEPFKCTVCGKTFKSNLHLIT |
| | | HKRTHIKNTT |
| 627 | human | MDLPVGPGAAGPSNVPAFLTKLWTLVSDPDTDALICWSPSGNSFHVFDQGQ |
| | HSF1 | FAKEVLPKYFKHNNMASFVRQLNMYGFRKVVHIEQGGLVKPERDDTEFQH |
| | | PCFLRGQEQLLENIKRKVTSVSTLKSEDIKIRQDSVTKLLTDVQLMKGKQEC |
| | | MDSKLLAMKHENEALWREVASLRQKHAQQQKVVNKLIQFLISLVQSNRIL |
| | | GVKRKIPLMLNDSGSAHSMPKYSRQFSLEHVHGSGPYSAPSPAYSSSSLYAP |
| | | DAVASSGPIISDITELAPASPMASPGGSIDERPLSSSPLVRVKEEPPSPPQSPRV |
| | | EEASPGRPSSVDTLLSPTALIDSILRESEPAPASVTALTDARGHTDTEGRPPSP |
| | | PPTSTPEKCLSVACLDNLARTPQMSRVARLFPCPSSSPHGQVQPGNELSDHL |
| | | DAMDSNLDNLQTMLSSHGFSVDTSALLDIQELLSPQEPPRPPEAENSSPDSA |
| | | GALHSAAAVPAGPRLRGHREQRPAGAV |
| 628 | Epstein- | MRPKKDGLEDFLRLTPEIKKQLGSLVSDYCNVLNKEFTAGSVEITLRSYKIC |
| | barr virus | KAFINEAKAHGREWGGLMATLNICNFWAILRNNRVRRRAENAGNDACSIA |
| | strain B95- | CPIVMRYVLDHLIVVTDRFFIQAPSNRVMIPATIGTAMYKLLKHSRVRAYTY |
| | 8 RTA | SKVLGVDRAAIMASGKQVVEHLNRMEKEGLLSSKFKAFCKWVFTYPVLEE |
| | | MFQTMVSSKTGHLTDDVKDVRALIKTLPRASYSSHAGQRSYVSGVLPACLL |
| | | STKSKAVETPILVSGADRMDEELMGNDGGASHTEARYSESGQFHAFTDELE |
| | | SLPSPTMPLKPGAQSADCGDSSSSSSDSGNSDTEQSEREEARAEAPRLRAPK |
| | | SRRTSRPNRGQTPCPSNAAEPEQPWIAAVHQESDERPIFPHPSKPTFLPPVKR |
| | | KKGLRDSREGMFLPKPEAGSAISDVFEGREVCQPKRIRPFHPPGSPWANRPL |
| | | PASLAPTPTGPVHEPVGSLTPAPVPQPLDPAPAVTPEASHLLEDPDEETSQAV |
| | | KALREMADTVIPQKEEAAICGQMDLSHPPPRGHLDELTTTLESMTEDLNLD |
| | | SPLTPELNEILDTFLNDECLLHAMHISTGLSIFDTSLF |
| 629 | ABL1_ | KENLLAGPSENDPNLFVALYDFVASGDNTLSITKGEKLRVLGYNHNGEWC |
| | HUMAN | EAQTKNGQGWVPSNYITPVNSLEKHSWYHG |
| 630 | AF9_ | KSDKQIKNGECDKAYLDELVELHRRLMTLRERHILQQIVNLIEETGHFHITN |
| | HUMAN | TTFDFDLCSLDKTTVRKLQSYLETSGTS |
| 631 | ANM2_ | ECSEAGLLQEGVQPEEFVAIADYAATDETQLSFLRGEKILILRQTTADWWW |
| | HUMAN | GERAGCCGYIPANHVGKHVDEYDPEDTWQ |
| 632 | APBB1_ | GSPSYGSPEDTDSFWNPNAFETDSDLPAGWMRVQDTSGTYYWHIPTGTTQ |
| | HUMAN | WEPPGRASPSQGSSPQEESQLTWTGFAHGE |
| 633 | APC16_ | DLAPPRKALFTYPKGAGEMLEDGSERFLCESVFSYQVASTLKQVKHDQQV |
| | HUMAN | ARMEKLAGLVEELEADEWRFKPIEQLLGFT |
| 634 | BTK_ | PEPAAAPVSTSELKKVVALYDYMPMNANDLQLRKGDEYFILEESNLPWWR |
| | HUMAN | ARDKNGQEGYIPSNYVTEAEDSIEMYEWYS |
| 635 | CACO1_ | SGGEEANLLLPELGSAFYDMASGFTVGTLSETSTGGPATPTWKECPICKERF |
| | HUMAN | PAESDKDALEDHMDGHFFFSTQDPFTFE |
| 636 | CRTC2_ | GPNIILTGDSSPGFSKEIAAALAGVPGFEVSAAGLELGLGLEDELRMEPLGLE |
| | HUMAN | GLNMLSDPCALLPDPAVEESFRSDRLQ |
| 637 | CRTC3_ | NCGSLPNTILPEDSSTSLFKDLNSALAGLPEVSLNVDTPFPLEEELQIEPLSLD |
| | HUMAN | GLNMLSDSSMGLLDPSVEETFRADRL |
| 638 | CXXC1_ | AGEDSKSENGENAPIYCICRKPDINCFMIGCDNCNEWFHGDCIRITEKMAKA |
| | HUMAN | IREWYCRECREKDPKLEIRYRHKKSRER |
| 639 | DPF1_ | PLSLGEDFYREAIEHCRSYNARLCAERSLRLPFLDSQTGVAQNNCYIWMEK |
| | HUMAN | THRGPGLAPGQIYTYPARCWRKKRRLNIL |
| 640 | DPY30_ | EYGLTDNVERIVENEKINAEKSSKQKVDLQSLPTRAYLDQTVVPILLQGLAV |
| | HUMAN | LAKERPPNPIEFLASYLLKNKAQFEDRN |
| 641 | EGR3_ | TVTYLGKFAFDSPSNWCQDNIISLMSAGILGVPPASGALSTQTSTASMVQPP |
| | HUMAN | QGDVEAMYPALPPYSNCGDLYSEPVSFH |
| 642 | ENL_ | SKPEKILKKGTYDKAYTDELVELHRRLMALRERNVLQQIVNLIEETGHFNV |
| | HUMAN | TNTTFDFDLFSLDETTVRKLQSCLEAVAT |
| 643 | FIGN_ | LLVQRTEGFSGLDVAHLCQEAVVGPLHAMPATDLSAIMPSQLRPVTYQDFE |
| | HUMAN | NAFCKIQPSISQKELDMYVEWNKMFGCSQ |
| 644 | FOXO1_ | GGYSSVSSCNGYGRMGLLHQEKLPSDLDGMFIERLDCDMESIIRNDLMDGD |
| | HUMAN | TLDFNFDNVLPNQSFPHSVKTTTHSWVSG |
| 645 | FOXO3_ | DSLSGSSLYSTSANLPVMGHEKFPSDLDLDMFNGSLECDMESIIRSELMDAD |
| | HUMAN | GLDFNFDSLISTQNVVGLNVGNFTGAKQ |
| 646 | IKKA_ | LVGSSLEGAVTPQTSAWLPPTSAEHDHSLSCVVTPQDGETSAQMIEENLNC |
| | HUMAN | LGHLSTIIHEANEEQGNSMMNLDWSWLTE |
| 647 | IMA5_ | RLGEQEAKRNGTGINPYCALIEEAYGLDKIEFLQSHENQEIYQKAFDLIEHYF |
| | HUMAN | GTEDEDSSIAPQVDLNQQQYIFQQCEA |
| 648 | ITCH_ | SGLIIPLTISGGSGPRPLNPVTQAPLPPGWEQRVDQHGRVYYVDHVEKRTT |
| | HUMAN | WDRPEPLPPGWERRVDNMGRIYYVDHFTR |
| 649 | KIBRA_ | PRPELPLPEGWEEARDFDGKVYYIDHTNRTTSWIDPRDRYTKPLTFADCISD |
| | HUMAN | ELPLGWEEAYDPQVGDYFIDHNTKTTQI |
| 650 | KPCI_ | QGHPFFRNVDWDMMEQKQVVPPFKPNISGEFGLDNFDSQFTNEPVQLTPD |
| | HUMAN | DDDIVRKIDQSEFEGFEYINPLLMSAEECV |
| 651 | KS6B2_ | HMNWDDLLAWRVDPPFRPCLQSEEDVSQFDTRFTRQTPVDSPDDTALSESA |
| | HUMAN | NQAFLGFTYVAPSVLDSIKEGFSFQPKLR |
| 652 | MTA3_ | GAVNGAVGTTFQPQNPLLGRACESCYATQSHQWYSWGPPNMQCRLCAIC |
| | HUMAN | WLYWKKYGGLKMPTQSEEEKLSPSPTTEDPR |
| 653 | MYB_ | EAQNVSSHVPYPVALHVNIVNVPQPAAAAIQRHYNDEDPEKEKRIKELELL |
| | HUMAN | LMSTENELKGQQVLPTQNHTCSYPGWHST |
| 654 | MYBA_ | FYIPVQIPGYQYVSPEGNCIEHVQPTSAFIQQPFIDEDPDKEKKIKELEMLLM |
| | HUMAN | SAENEVRRKRIPSQPGSFSSWSGSFLM |
| 655 | NCOA2_ | PFGSSPDDLLCPHPAAESPSDEGALLDQLYLALRNFDGLEEIDRALGIPELVS |
| | HUMAN | QSQAVDPEQFSSQDSNIMLEQKAPVFP |
| 656 | NCOA3_ | LRNSLDDLVGPPSNLEGQSDERALLDQLHTLLSNTDATGLEEIDRALGIPEL |
| | HUMAN | VNQGQALEPKQDAFQGQEAAVMMDQKAG |
| 657 | NOTC1_ | LCHILDYSFGGGAGRDIPPPLIEEACELPECQEDAGNKVCSLQCNNHACGW |
| | HUMAN | DGGDCSLNFNDPWKNCTQSLQCWKYFSDG |
| 658 | NOTC1_ | LQCNNHACGWDGGDCSLNFNDPWKNCTQSLQCWKYFSDGHCDSQCNSA |
| | HUMAN | GCLFDGFDCQRAEGQCNPLYDQYCKDHFSDGH |
| 659 | NOTC2_ | EACNSHACQWDGGDCSLTMENPWANCSSPLPCWDYINNQCDELCNTVEC |
| | HUMAN | LFDNFECQGNSKTCKYDKYCADHFKDNHCDQ |
| 660 | PRP19_ | TNKILTGGADKNVVVFDKSSEQILATLKGHTKKVTSVVFHPSQDLVFSASP |
| | HUMAN | DATIRIWSVPNASCVQVVRAHESAVTGLS |
| 661 | PYGO1_ | RHGHSSSDPVYPCGICTNEVNDDQDAILCEASCQKWFHRICTGMTETAYGL |
| | HUMAN | LTAEASAVWGCDTCMADKDVQLMRTRETF |
| 662 | PYGO2_ | SGPQPPPGLVYPCGACRSEVNDDQDAILCEASCQKWFHRECTGMTESAYGL |
| | HUMAN | LTTEASAVWACDLCLKTKEIQSVYIREGM |
| 663 | SAV1_ | HASGIGRVAATSLGNLTNHGSEDLPLPPGWSVDWTMRGRKYYIDHNTNTT |
| | HUMAN | HWSHPLEREGLPPGWERVESSEFGTYYVDH |
| 664 | SMCA2_ | SQPGALIPGDPQAMSQPNRGPSPFSPVQLHQLRAQILAYKMLARGQPLPETL |
| | HUMAN | QLAVQGKRTLPGLQQQQQ |
| 665 | SMRC2_ | MYTKKNVPSKSKAAASATREWTEQETLLLLEALEMYKDDWNKVSEHVGS |
| | HUMAN | RTQDECILHFLRLPIEDPYLEDSEASLGPLA |
| 666 | STAT2_ | SQTVPEPDQGPVSQPVPEPDLPCDLRHLNTEPMEIFRNCVKIEEIMPNGDPLL |
| | HUMAN | AGQNTVDEVYVSRPSHFYTDGPLMPSD |
| 667 | T2EB_ | SSGYKFGVLAKIVNYMKTRHQRGDTHPLTLDEILDETQHLDIGLKQKQWL |
| | HUMAN | MTEALVNNPKIEVIDGKYAFKPKYNVRDKK |
| 668 | U2AF4_ | VEVQEHYDSFFEEVFTELQEKYGEIEEMNVCDNLGDHLVGNVYVKFRREE |
| | HUMAN | DGERAVAELSNRWFNGQAVHGELSPVTDFR |
| 669 | WBP4_ | YYDLISGASQWEKPEGFQGDLKKTAVKTVWVEGLSEDGFTYYYNTETGES |
| | HUMAN | RWEKPDDFIPHTSDLPSSKVNENSLGTLDE |
| 670 | WWP1_ | AMQQFNQRYLYSASMLAAENDPYGPLPPGWEKRVDSTDRVYFVNHNTKT |
| | HUMAN | TQWEDPRTQGLQNEEPLPEGWEIRYTREGVR |
| 671 | WWP2_ | AMQHFSQRFLYQSSSASTDHDPLGPLPPGWEKRQDNGRVYYVNHNTRTTQ |
| | HUMAN | WEDPRTQGMIQEPALPPGWEMKYTSEGVRY |
| 672 | WWTR1_ | GAAGSPAQQHAHLRQQSYDVTDELPLPPGWEMTFTATGQRYFLNHIEKITT |
| | HUMAN | WQDPRKAMNQPLNHMNLHPAVSSTPVPQR |
| 673 | ZFP28_ | LEYSLLGEHWDYDALFETQPGLVTIKNLAVDFRQQLHPAQKNFCKNGIWE |
| | HUMAN | NNSDLGSAGHCVAKPDLVSLLEQEKEPWMV |
| 674 | ZN473_ | AEEFVTLKDVGMDFTLGDWEQLGLEQGDTFWDTALDNCQDLFLLDPPRPN |
| | HUMAN | LTSHPDGSEDLEPLAGGSPEATSPDVTETK |
| 675 | ZN496_ | QEENVRDTQQVTTLQLPPSRVSPFKDMILCFSEEDWSLLDPAQTGFYGEFIIG |
| | HUMAN | EDYGVSMPPNDLAAQPDLSQGEENEPR |
| 676 | ZN597_ | ASMPPTPEAQGPILFEDLAVYFSQEECVTLHPAQRSLSKDGTKESLEDAALM |
| | HUMAN | GEEGKPEINQQLSLESMELDELALEKYP |
| 677 | p300 | MAENVVEPGPPSAKRPKLSSPALSASASDGTDFGSLFDLEHDLPDELINSTEL |
| | | GLTNGGDINQLQTSLGMVQDAASKHKQLSELLRSGSSPNLNMGVGGPGQV |
| | | MASQAQQSSPGLGLINSMVKSPMTQAGLTSPNMGMGTSGPNQGPTQSTGM |
| | | MNSPVNQPAMGMNTGMNAGMNPGMLAAGNGQGIMPNQVMNGSIGAGR |
| | | GRQNMQYPNPGMGSAGNLLTEPLQQGSPQMGGQTGLRGPQPLKMGMMN |
| | | NPNPYGSPYTQNPGQQIGASGLGLQIQTKTVLSNNLSPFAMDKKAVPGGGM |
| | | PNMGQQPAPQVQQPGLVTPVAQGMGSGAHTADPEKRKLIQQQLVLLLHA |
| | | HKCQRREQANGEVRQCNLPHCRTMKNVLNHMTHCQSGKSCQVAHCASSR |
| | | QIISHWKNCTRHDCPVCLPLKNAGDKRNQQPILTGAPVGLGNPSSLGVGQQ |
| | | SAPNLSTVSQIDPSSIERAYAALGLPYQVNQMPTQPQVQAKNQQNQQPGQS |
| | | PQGMRPMSNMSASPMGVNGGVGVQTPSLLSDSMLHSAINSQNPMMSENAS |
| | | VPSLGPMPTAAQPSTTGIRKQWHEDITQDLRNHLVHKLVQAIFPTPDPAALK |
| | | DRRMENLVAYARKVEGDMYESANNRAEYYHLLAEKIYKIQKELEEKRRTR |
| | | LQKQNMLPNAAGMVPVSMNPGPNMGQPQPGMTSNGPLPDPSMIRGSVPN |
| | | QMMPRITPQSGLNQFGQMSMAQPPIVPRQTPPLQHHGQLAQPGALNPPMG |
| | | YGPRMQQPSNQGQFLPQTQFPSQGMNVTNIPLAPSSGQAPVSQAQMSSSSC |
| | | PVNSPIMPPGSQGSHIHCPQLPQPALHQNSPSPVPSRTPTPHHTPPSIGAQQPP |
| | | ATTIPAPVPTPPAMPPGPQSQALHPPPRQTPTPPTTQLPQQVQPSLPAAPSAD |
| | | QPQQQPRSQQSTAASVPTPTAPLLPPQPATPLSQPAVSIEGQVSNPPSTSSTE |
| | | VNSQAIAEKQPSQEVKMEAKMEVDQPEPADTQPEDISESKVEDCKMESTET |
| | | EERSTELKTEIKEEEDQPSTSATQSSPAPGQSKKKIFKPEELRQALMPTLEAL |
| | | YRQDPESLPFRQPVDPQLLGIPDYFDIVKSPMDLSTIKRKLDTGQYQEPWQY |
| | | VDDIWLMFNNAWLYNRKTSRVYKYCSKLSEVFEQEIDPVMQSLGYCCGRK |
| | | LEFSPQTLCCYGKQLCTIPRDATYYSYQNRYHFCEKCFNEIQGESVSLGDDP |
| | | SQPQTTINKEQFSKRKNDTLDPELFVECTECGRKMHQICVLHHEIIWPAGFV |
| | | CDGCLKKSARTRKENKFSAKRLPSTRLGTFLENRVNDFLRRQNHPESGEVT |
| | | VRVVHASDKTVEVKPGMKARFVDSGEMAESFPYRTKALFAFEEIDGVDLC |
| | | FFGMHVQEYGSDCPPPNQRRVYISYLDSVHFFRPKCLRTAVYHEILIGYLEY |
| | | VKKLGYTTGHIWACPPSEGDDYIFHCHPPDQKIPKPKRLQEWYKKMLDKA |
| | | VSERIVHDYKDIFKQATEDRLTSAKELPYFEGDFWPNVLEESIKELEQEEEE |
| | | RKREENTSNESTDVTKGDSKNAKKKNNKKTSKNKSSLSRGNKKKPGMPNV |
| | | SNDLSQKLYATMEKHKEVFFVIRLIAGPAANSLPPIVDPDPLIPCDLMDGRD |
| | | AFLTLARDKHLEFSSLRRAQWSTMCMLVELHTQSQDRFVYTCNECKHHVE |
| | | TRWHCTVCEDYDLCITCYNTKNHDHKMEKLGLGLDDESNNQQAAATQSP |
| | | GDSRRLSIQRCIQSLVHACQCRNANCSLPSCQKMKRVVQHTKGCKRKTNG |
| | | GCPICKQLIALCCYHAKHCQENKCPVPFCLNIKQKLRQQQLQHRLQQAQML |
| | | RRRMASMQRTGVVGQQQGLPSPTPATPTTPTGQQPTTPQTPQPTSQPQPTPP |
| | | NSMPPYLPRTQAAGPVSQGKAAGQVTPPTPPQTAQPPLPGPPPAAVEMAM |
| | | QIQRAAETQRQMAHVQIFQRPIQHQMPPMTPMAPMGMNPPPMTRGPSGHL |
| | | EPGMGPTGMQQQPPWSQGGLPQPQQLQSGMPRPAMMSVAQHGQPLNMA |
| | | PQPGLGQVGISPLKPGTVSQQALQNLLRTLRSPSSPLQQQQVLSILHANPQLL |
| | | AAFIKQRAAKYANSNPQPIPGQPGMPQGQPGLQPPTMPGQQGVHSNPAMQ |
| | | NMNPMQAGVQRAGLPQQQPQQQLQPPMGGMSPQAQQMNMNHNTMPSQF |
| | | RDILRRQQMMQQQQQQGAGPGIGPGMANHNQFQQPQGVGYPPQQQQRM |
| | | QHHMQQMQQGNMGQIGQLPQALGAEAGASLQAYQQRLLQQQMGSPVQP |
| | | NPMSPQQHMLPNQAQSPHLQGQQIPNSLSNQVRSPQPVPSPRPQSQPPHSSP |
| | | SPRMQPQPSPHHVSPQTSSPHPGLVAAQANPMEQGHFASPDQNSMLSQLAS |
| | | NPGMANLHGASATDLGLSTDNSDLNSNLSQSTLDIH |
| 678 | CREBBP | MAENLLDGPPNPKRAKLSSPGFSANDSTDFGSLFDLENDLPDELIPNGGELG |
| | | LLNSGNLVPDAASKHKQLSELLRGGSGSSINPGIGNVSASSPVQQGLGGQA |
| | | QGQPNSANMASLSAMGKSPLSQGDSSAPSLPKQAASTSGPTPAASQALNPQ |
| | | AQKQVGLATSSPATSQTGPGICMNANFNQTHPGLLNSNSGHSLINQASQGQ |
| | | AQVMNGSLGAAGRGRGAGMPYPTPAMQGASSSVLAETLTQVSPQMTGHA |
| | | GLNTAQAGGMAKMGITGNTSPFGQPFSQAGGQPMGATGVNPQLASKQSM |
| | | VNSLPTFPTDIKNTSVTNVPNMSQMQTSVGIVPTQAIATGPTADPEKRKLIQ |
| | | QQLVLLLHAHKCQRREQANGEVRACSLPHCRTMKNVLNHMTHCQAGKAC |
| | | QVAHCASSRQIISHWKNCTRHDCPVCLPLKNASDKRNQQTILGSPASGIQNT |
| | | IGSVGTGQQNATSLSNPNPIDPSSMQRAYAALGLPYMNQPQTQLQPQVPGQ |
| | | QPAQPQTHQQMRTLNPLGNNPMNIPAGGITTDQQPPNLISESALPTSLGATN |
| | | PLMNDGSNSGNIGTLSTIPTAAPPSSTGVRKGWHEHVTQDLRSHLVHKLVQ |
| | | AIFPTPDPAALKDRRMENLVAYAKKVEGDMYESANSRDEYYHLLAEKIYKI |
| | | QKELEEKRRSRLHKQGILGNQPALPAPGAQPPVIPQAQPVRPPNGPLSLPVN |
| | | RMQVSQGMNSFNPMSLGNVQLPQAPMGPRAASPMNHSVQMNSMGSVPG |
| | | MAISPSRMPQPPNMMGAHTNNMMAQAPAQSQFLPQNQFPSSSGAMSVGM |
| | | GQPPAQTGVSQGQVPGAALPNPLNMLGPQASQLPCPPVTQSPLHPTPPPAST |
| | | AAGMPSLQHTTPPGMTPPQPAAPTQPSTPVSSSGQTPTPTPGSVPSATQTQST |
| | | PTVQAAAQAQVTPQPQTPVQPPSVATPQSSQQQPTPVHAQPPGTPLSQAAA |
| | | SIDNRVPTPSSVASAETNSQQPGPDVPVLEMKTETQAEDTEPDPGESKGEPR |
| | | SEMMEEDLQGASQVKEETDIAEQKSEPMEVDEKKPEVKVEVKEEEESSSNG |
| | | TASQSTSPSQPRKKIFKPEELRQALMPTLEALYRQDPESLPFRQPVDPQLLGI |
| | | PDYFDIVKNPMDLSTIKRKLDTGQYQEPWQYVDDVWLMFNNAWLYNRKT |
| | | SRVYKFCSKLAEVFEQEIDPVMQSLGYCCGRKYEFSPQTLCCYGKQLCTIPR |
| | | DAAYYSYQNRYHFCEKCFTEIQGENVTLGDDPSQPQTTISKDQFEKKKNDT |
| | | LDPEPFVDCKECGRKMHQICVLHYDIIWPSGFVCDNCLKKTGRPRKENKFS |
| | | AKRLQTTRLGNHLEDRVNKFLRRQNHPEAGEVFVRVVASSDKTVEVKPGM |
| | | KSRFVDSGEMSESFPYRTKALFAFEEIDGVDVCFFGMHVQEYGSDCPPPNT |
| | | RRVYISYLDSIHFFRPRCLRTAVYHEILIGYLEYVKKLGYVTGHIWACPPSEG |
| | | DDYIFHCHPPDQKIPKPKRLQEWYKKMLDKAFAERIIHDYKDIFKQATEDR |
| | | LTSAKELPYFEGDFWPNVLEESIKELEQEEEERKKEESTAASETTEGSQGDS |
| | | KNAKKKNNKKTNKNKSSISRANKKKPSMPNVSNDLSQKLYATMEKHKEV |
| | | FFVIHLHAGPVINTLPPIVDPDPLLSCDLMDGRDAFLTLARDKHWEFSSLRR |
| | | SKWSTLCMLVELHTQGQDRFVYTCNECKHHVETRWHCTVCEDYDLCINC |
| | | YNTKSHAHKMVKWGLGLDDEGSSQGEPQSKSPQESRRLSIQRCIQSLVHAC |
| | | QCRNANCSLPSCQKMKRVVQHTKGCKRKTNGGCPVCKQLIALCCYHAKH |
| | | CQENKCPVPFCLNIKHKLRQQQIQHRLQQAQLMRRRMATMNTRNVPQQSL |
| | | PSPTSAPPGTPTQQPSTPQTPQPPAQPQPSPVSMSPAGFPSVARTQPPTTVSTG |
| | | KPTSQVPAPPPPAQPPPAAVEAARQIEREAQQQQHLYRVNINNSMPPGRTG |
| | | MGTPGSQMAPVSLNVPRPNQVSGPVMPSMPPGQWQQAPLPQQQPMPGLPR |
| | | PVISMQAQAAVAGPRMPSVQPPRSISPSALQDLLRTLKSPSSPQQQQQVLNI |
| | | LKSNPQLMAAFIKQRTAKYVANQPGMQPQPGLQSQPGMQPQPGMHQQPSL |
| | | QNLNAMQAGVPRPGVPPQQQAMGGLNPQGQALNIMNPGHNPNMASMNP |
| | | QYREMLRRQLLQQQQQQQQQQQQQQQQQQGSAGMAGGMAGHGQFQQP |
| | | QGPGGYPPAMQQQQRMQQHLPLQGSSMGQMAAQMGQLGQMGQPGLGA |
| | | DSTPNIQQALQQRILQQQQMKQQIGSPGQPNPMSPQQHMLSGQPQASHLPG |
| | | QQIATSLSNQVRSPAPVQSPRPQSQPPHSSPSPRIQPQPSPHHVSPQTGSPHPG |
| | | LAVTMASSIDQGHLGNPEQSAMLPQLNTPSRSALSSELSLVGDTTGDTLEKF |
| | | VEGL |
| 679 | linker | SGSETPGTSESATPES |
| 680 | linker | SGGS |
| 681 | linker | SGGSSGSETPGTSESATPESSGGS |
| 682 | linker | SGGSSGGSSGSETPGTSESATPESSGGSSGGS |
| 683 | linker | GGSGGSPGSPAGSPTSTEEGTSESATPESGPGTSTEPSEGSAPGSPAGSPTSTE |
| | | EGTSTEPSEGSAPGTSTEPSEGSAPGTSESATPESGPGSEPATSGGSGGS |
| 684 | XTEN | SGSETPGTSESATPES |
| | linker | |
| 685 | XTEN | SGGSSGGSSGSETPGTSESATPES |
| | linker | |
| 686 | XTEN | SGGSSGGSSGSETPGTSESATPESSGGSSGGSSGGSSGGS |
| | linker | |
| 687 | XTEN | SGGSSGGSSGSETPGTSESATPESSGGSSGGSSGGSSGGSSGSETPGTSESATP |
| | linker | ESSGGSSGGS |
| 688 | XTEN | PGSPAGSPTSTEEGTSESATPESGPGTSTEPSEGSAPGSPAGSPTSTEEGTSTEP |
| | linker | SEGSAPGTSTEPSEGSAPGTSESATPESGPGSEPATS |
| 689 | NLS | PKKKRKV |
| 690 | NLS | AVKRPAATKKAGQAKKKKLD |
| 691 | NLS | MSRRRKANPTKLSENAKKLAKEVEN |
| 692 | NLS | PAAKRVKLD |
| 693 | NLS | KLKIKRPVK |
| 694 | NLS | MDSLLMNRRKFLYQFKNVRWAKGRRETYLC |
| 695 | overlapping | GTACGTCGTCTTTAGGTTGGGGGGAGGGGTTTTATGCGATGGAGTTTC |
| | binding | CCCACACTGAGTGGGTGGAGACTGAAGTTAGGCCAGCTTGGCACTTGA |
| | sites | TGTAATTCTCCTTGGAATTTGCCCTTTTTGAGTTTGGATCTTGGTTCATTC |
| | | TCAAGCCTCAGACAGTGGTTCAAAGTTTTTTTCTTCCATTTCAGGTGTCG |
| | | TGACGCTAGCGCTACCGGTCGCCACCATGGTGAGCAAGGGCGCCGAGCT |
| | | GTTCACCGGCATCGTGCCCATCCTGATCGAGCTGAATGGCGATGTGAA |
| | | TGGCCACAAGTTCAGCGTGAGCGGCGAGGGCGAGGGCGATGCCACCTA |
| | | CGGCAAGCTGACCCTGAAGTTCATCTGCACCACCGGCAAGCTGCCTGTG |
| | | CCCTGGCCC |
| 696 | GFP-1 | TAGGTTgGGGGGAGGGGTT |
| | target | |
| | binding site | |
| 697 | GFP-2 | GTGGGTGGAGACtGAAGTT |
| | target | |
| | binding site | |
| 698 | GFP-3 | TGGGCAcGATGCCGGTGAA |
| | target | |
| | binding site | |
| 699 | GFP-4 | GGCGAGGGCGAGGGCGAT |
| | target | |
| | binding site | |
| 700 | GFP-5 | GAGGGCGAGGGCGATGCC |
| | target | |
| | binding site | |
| 701 | GFP-6 | GCCGGTGGTGCAGATGAA |
| | target | |
| | binding site | |
| 702 | GFP-7 | GCAGCTtGCCGGTGGTGCA |
| | target | |
| | binding site | |
| 703 | Exemplary | SRPGERPFQCRICMRNFS[F1]HTRTHTGEKPFQCRICMRNFS[F2]HLRTH[linker1] |
| | Zinc Finger | FQCRICMRNFS[F3]HTRTHTGEKPFQCRICMRNFS[F4]HLRTH[linker2] |
| | Sequence | FQCRICMRNFS[F5]HTRTHTGEKPFQCRICMRNFS[F6]HLRTHLRGS |
| 704 | linker | TGSQKP |
| 705 | linker | TGGGGSQKP |

| | SEQ ID | F1 | SEQ ID | F2 | SEQ ID | F3 |
|---|---|---|---|---|---|---|
| Description | NO | Sequence | NO | Sequence | NO | Sequence |
| GFP1-ZF1 | 716 | HKSSLTR | 757 | RTEHLAR | 798 | QSAHLKR |
| GFP1-ZF2 | 717 | HKSSLTR | 758 | RTEHLAR | 799 | TSAHLAR |
| GFP1-ZF3 | 718 | IKAILTR | 759 | RREHLVR | 800 | QSAHLKR |
| GFP1-ZF4 | 719 | IKAILTR | 760 | RREHLVR | 801 | TSAHLAR |
| GFP2-ZF1 | 720 | TSTLLNR | 761 | QQTNLTR | 802 | DEANLRR |
| GFP2-ZF2 | 721 | TSTLLNR | 762 | QQTNLTR | 803 | DEANLRR |
| GFP2-ZF3 | 722 | TSTLLNR | 763 | QQTNLTR | 804 | DRGNLTR |
| GFP2-ZF4 | 723 | TSTLLNR | 764 | QQTNLTR | 805 | DRGNLTR |
| GFP2-ZF5 | 724 | HKSSLTR | 765 | QTNNLGR | 806 | DEANLRR |
| GFP2-ZF6 | 725 | HKSSLTR | 766 | QTNNLGR | 807 | DEANLRR |
| GFP2-ZF7 | 726 | HKSSLTR | 767 | QTNNLGR | 808 | DRGNLTR |
| GFP2-ZF8 | 727 | HKSSLTR | 768 | QTNNLGR | 809 | DRGNLTR |
| GFP3-ZF1 | 728 | QQTNLTR | 769 | IRHHLKR | 810 | DSSVLRR |
| GFP3-ZF2 | 729 | QQTNLTR | 770 | IRHHLKR | 811 | DGSTLNR |
| GFP3-ZF3 | 730 | RKPNLLR | 771 | EAHHLSR | 812 | DSSVLRR |
| GFP3-ZF4 | 731 | RKPNLLR | 772 | EAHHLSR | 813 | DGSTLNR |
| GFP4-ZF1 | 732 | VRHNLTR | 773 | ESGHLKR | 814 | RQDNLGR |
| GFP5-ZF1 | 733 | DSSVLRR | 774 | LSTNLTR | 815 | LKEHLTR |
| GFP5-ZF2 | 734 | DSSVLRR | 775 | LSTNLTR | 816 | LKEHLTR |
| GFP5-ZF3 | 735 | DSSVLRR | 776 | LSTNLTR | 817 | SPSKLVR |
| GFP5-ZF4 | 736 | DSSVLRR | 777 | LSTNLTR | 818 | SPSKLVR |
| GFP5-ZF5 | 737 | DGSTLNR | 778 | VRHNLTR | 819 | LKEHLTR |
| GFP5-ZF6 | 738 | DGSTLNR | 779 | VRHNLTR | 820 | LKEHLTR |
| GFP5-ZF7 | 739 | DGSTLNR | 780 | VRHNLTR | 821 | SPSKLVR |
| GFP5-ZF8 | 740 | DGSTLNR | 781 | VRHNLTR | 822 | SPSKLVR |
| GFP6-ZF1 | 741 | RKPNLLR | 782 | VRHNLTR | 823 | DKAQLGR |
| GFP6-ZF2 | 742 | RKPNLLR | 783 | VRHNLTR | 824 | DKAQLGR |
| GFP6-ZF3 | 743 | RKPNLLR | 784 | VRHNLTR | 825 | QSTTLKR |
| GFP6-ZF4 | 744 | RKPNLLR | 785 | VRHNLTR | 826 | QSTTLKR |
| GFP6-ZF5 | 745 | QQTNLTR | 786 | VGSNLTR | 827 | DKAQLGR |
| GFP6-ZF6 | 746 | QQTNLTR | 787 | VGSNLTR | 828 | DKAQLGR |
| GFP6-ZF7 | 747 | QQTNLTR | 788 | VGSNLTR | 829 | QSTTLKR |
| GFP6-ZF8 | 748 | QQTNLTR | 789 | VGSNLTR | 830 | QSTTLKR |
| GFP7-ZF1 | 749 | QSTTLKR | 790 | VDHHLRR | 831 | EAHHLSR |
| GFP7-ZF2 | 750 | QSTTLKR | 791 | VDHHLRR | 832 | EAHHLSR |
| GFP7-ZF3 | 751 | QSTTLKR | 792 | VDHHLRR | 833 | RQSRLQR |
| GFP7-ZF4 | 752 | QSTTLKR | 793 | VDHHLRR | 834 | RQSRLQR |
| GFP7-ZF5 | 753 | DKAQLGR | 794 | EAHHLSR | 835 | EAHHLSR |
| GFP7-ZF6 | 754 | DKAQLGR | 795 | EAHHLSR | 836 | EAHHLSR |
| GFP7-ZF7 | 755 | DKAQLGR | 796 | EAHHLSR | 837 | RQSRLQR |
| GFP7-ZF8 | 756 | DKAQLGR | 797 | EAHHLSR | 838 | RQSRLQR |
| GFP1-ZF1 | 839 | RTEHLAR | 880 | HKSSLTR | 921 | RPESLAP |
| GFP1-ZF2 | 840 | RREHLVR | 881 | HKSSLTR | 922 | RPESLAP |
| GFP1-ZF3 | 841 | RTEHLAR | 882 | HKSSLTR | 923 | RPESLAP |
| GFP1-ZF4 | 842 | RREHLVR | 883 | HKSSLTR | 924 | RPESLAP |
| GFP2-ZF1 | 843 | QSAHLKR | 884 | IPNKLAR | 925 | RREVLEN |
| GFP2-ZF2 | 844 | QSAHLKR | 885 | EAHHLSR | 926 | RKDALHV |
| GFP2-ZF3 | 845 | QGGHLKR | 886 | IPNKLAR | 927 | RREVLEN |
| GFP2-ZF4 | 846 | QGGHLKR | 887 | EAHHLSR | 928 | RKDALHV |
| GFP2-ZF5 | 847 | QSAHLKR | 888 | IPNKLAR | 929 | RREVLEN |
| GFP2-ZF6 | 848 | QSAHLKR | 889 | EAHHLSR | 930 | RKDALHV |
| GFP2-ZF7 | 849 | QGGHLKR | 890 | IPNKLAR | 931 | RREVLEN |
| GFP2-ZF8 | 850 | QGGHLKR | 891 | EAHHLSR | 932 | RKDALHV |
| GFP3-ZF1 | 851 | LSTNLTR | 892 | QSTTLKR | 933 | RSDHLSL |
| GFP3-ZF2 | 852 | VRHNLTR | 893 | QSTTLKR | 934 | RSDHLSL |
| GFP3-ZF3 | 853 | LSTNLTR | 894 | QSTTLKR | 935 | RSDHLSL |
| GFP3-ZF4 | 854 | VRHNLTR | 895 | QSTTLKR | 936 | RSDHLSL |
| GFP4-ZF1 | 855 | KNHSLNN | 896 | RQDNLGR | 937 | KNHSLNN |
| GFP5-ZF1 | 856 | RVDNLPR | 897 | LKEHLTR | 938 | RVDNLPR |
| GFP5-ZF2 | 857 | RVDNLPR | 898 | SPSKLVR | 939 | RQDNLGR |
| GFP5-ZF3 | 858 | RQDNLGR | 899 | LKEHLTR | 940 | RVDNLPR |
| GFP5-ZF4 | 859 | RQDNLGR | 900 | SPSKLVR | 941 | RQDNLGR |
| GFP5-ZF5 | 860 | RVDNLPR | 901 | LKEHLTR | 942 | RVDNLPR |
| GFP5-ZF6 | 861 | RVDNLPR | 902 | SPSKLVR | 943 | RQDNLGR |
| GFP5-ZF7 | 862 | RQDNLGR | 903 | LKEHLTR | 944 | RVDNLPR |
| GFP5-ZF8 | 863 | RQDNLGR | 904 | SPSKLVR | 945 | RQDNLGR |
| GFP6-ZF1 | 864 | EAHHLSR | 905 | RQSRLQR | 946 | KGDHLRR |
| GFP6-ZF2 | 865 | EAHHLSR | 906 | EAHHLSR | 947 | DPSNLRR |
| GFP6-ZF3 | 866 | VDHHLRR | 907 | RQSRLQR | 948 | KGDHLRR |
| GFP6-ZF4 | 867 | VDHHLRR | 908 | EAHHLSR | 949 | DPSNLRR |
| GFP6-ZF5 | 868 | EAHHLSR | 909 | RQSRLQR | 950 | KGDHLRR |
| GFP6-ZF6 | 869 | EAHHLSR | 910 | EAHHLSR | 951 | DPSNLRR |
| GFP6-ZF7 | 870 | VDHHLRR | 911 | RQSRLQR | 952 | KGDHLRR |
| GFP6-ZF8 | 871 | VDHHLRR | 912 | EAHHLSR | 953 | DPSNLRR |
| GFP7-ZF1 | 872 | DPSNLRR | 913 | QRSDLTR | 954 | QGGTLRR |
| GFP7-ZF2 | 873 | DPSNLRR | 914 | TKQILGR | 955 | QSTTLKR |
| GFP7-ZF3 | 874 | DSSVLRR | 915 | QRSDLTR | 956 | QGGTLRR |
| GFP7-ZF4 | 875 | DSSVLRR | 916 | TKQILGR | 957 | QSTTLKR |
| GFP7-ZF5 | 876 | DPSNLRR | 917 | QRSDLTR | 958 | QGGTLRR |
| GFP7-ZF6 | 877 | DPSNLRR | 918 | TKQILGR | 959 | QSTTLKR |
| GFP7-ZF7 | 878 | DSSVLRR | 919 | QRSDLTR | 960 | QGGTLRR |
| GFP7-ZF8 | 879 | DSSVLRR | 920 | TKQILGR | 961 | QSTTLKR |

| SEQ | | |
|---|---|---|
| ID NO | Description | Sequence |
| 962 | SPACER | GCCTACCGCAGGATGTTCGG |
| 963 | SPACER | GGCCCGGGGACGAGGCGTAG |
| 964 | SPACER | GCGCACGGCAGAGGAGCGCG |
| 965 | SPACER | GCCCTCGTTCGCCTCTTCTC |
| 966 | TRACR | GTTTAAGAGCTAAGCTGGAAACAGCATAGCAAGTTTAAATAAGG |
| | | CTAGTCCGTTATCAACTTGAAAAAGTGGCACCGAGTCGGTGCTTT |
| | | TTTT |
| 967 | TRACR | GTTTAAGAGCTAAGCTGGAAACAGCATAGCAAGTTTAAATAAGG |
| | | CTAGTCCGTTATCAACTTGAAAAAGTGGCACCGAGTCGGTGCTTT |
| | | TTTT |
| 968 | TRACR | GTTTAAGAGCTAAGCTGGAAACAGCATAGCAAGTTTAAATAAGG |
| | | CTAGTCCGTTATCAACTTGAAAAAGTGGCACCGAGTCGGTGCTTT |
| | | TTTT |
| 969 | TRACR | GTTTAAGAGCTAAGCTGGAAACAGCATAGCAAGTTTAAATAAGG |
| | | CTAGTCCGTTATCAACTTGAAAAAGTGGCACCGAGTCGGTGCTTT |
| | | TTTT |
| 970 | SPACER | GTGTCCAGGGACAATGAGCA |
| 971 | SPACER | GCGGCCCGGAGCCTACGAGG |
| 972 | SPACER | GCGGCGGCGGCAGCAGCTGCG |
| 973 | SPACER | GCCGGACTCGGACGCGTGGT |
| 974 | TRACR | GTTTAAGAGCTAAGCTGGAAACAGCATAGCAAGTTTAAATAAGG |
| | | CTAGTCCGTTATCAACTTGAAAAAGTGGCACCGAGTCGGTGCTTT |
| | | TTTT |
| 975 | TRACR | GTTTAAGAGCTAAGCTGGAAACAGCATAGCAAGTTTAAATAAGG |
| | | CTAGTCCGTTATCAACTTGAAAAAGTGGCACCGAGTCGGTGCTTT |
| | | TTTT |
| 976 | TRACR | GTTTAAGAGCTAAGCTGGAAACAGCATAGCAAGTTTAAATAAGG |
| | | CTAGTCCGTTATCAACTTGAAAAAGTGGCACCGAGTCGGTGCTTT |
| | | TTTT |
| 977 | TRACR | GTTTAAGAGCTAAGCTGGAAACAGCATAGCAAGTTTAAATAAGG |
| | | CTAGTCCGTTATCAACTTGAAAAAGTGGCACCGAGTCGGTGCTTT |
| | | TTTT |
| 978 | DNMT3A- | MAPKKKRKMNHDQEFDPPKVYPPVPAEKRKPIRVLSLFDGIATGLLVL |
| | 3L-ZF- | KDLGIQVDRYIASEVCEDSITVGMVRHQGKIMYVGDVRSVTQKHIQEWG |
| | KRAB (ZF | PFDLVIGGSPCNDLSIVNPARKGLYEGTGRLFFEFYRLLHDARPKEGDDR |
| | is GFP1- | PFFWLFENVVAMGVSDKRDISRFLESNPVMIDAKEVSAAHRARYFWGNL |
| | ZF1) | PGMNRPLASTVNDKLELQECLEHGRIAKFSKVRTITTRSNSIKQGKDQHF |
| | | PVFMNEKEDILWCTEMERVFGFPVHYTDVSNMSRLARQRLLGRSWSVPV |
| | | IRHLFAPLKEYFACVSSGNSNANSRGPSFSSGLVPLSLRGSHMGPME |
| | | IYKTVSAWKRQPVRVLSLFRNIDKVLKSLGFLESGSGSGGGTLK |
| | | YVEDVTNVVRRDVEKWGPFDLVYGSTQPLGSSCDRCPGWYMFQ |
| | | FHRILQYALPRQESQRPFFWIFMDNLLLTEDDQETTTRFLQTEAV |
| | | TLQDVRGRDYQNAMRVWSNIPGLKSKHAPLTPKEEEYLQAQVR |
| | | SRSKLDAPKVDLLVKNCLLPLREYFKYFSQNSLPLSGGGGSGGGG |
| | | SVGIHGVPSRPGERPFQCRICMRNFSHKSSLTRHTRTHTGEKPFQCRI |
| | | CMRNFSRTEHLARHLRTHTGSQKPFQCRICMRNFSQSAHLKRHTRT |
| | | HTGEKPFQCRICMRNFSRTEHLARHLRTHTGGGGSQKPFQCRICMRN |
| | | FSHKSSLTRHTRTHTGEKPFQCRICMRNFSRPESLAPHLRTHLRGSGG |
| | | GSMDAKSLTAWSRTLVTFKDVFVDFTREEWKLLDTAQQIVYRNVM |
| | | LENYKNLVSLGYQLTKPDVILRLEKGEEPWLVEREIHQETHPDSETA |
| | | FEIKSSV |
| 979 | DNMT3A/ | MNHDQEFDPPKVYPPVPAEKRKPIRVLSLFDGIATGLLVLKDLGIQV |
| | L- | DRYIASEVCEDSITVGMVRHQGKIMYVGDVRSVTQKHIQEWGPFDL |
| | dSpCas9- | VIGGSPCNDLSIVNPARKGLYEGTGRLFFEFYRLLHDARPKEGDDRPF |
| | XTEN16- | FWLFENVVAMGVSDKRDISRFLESNPVMIDAKEVSAAHRARYFWG |
| | ZIM3 | NLPGMNRPLASTVNDKLELQECLEHGRIAKFSKVRTITTRSNSIKQGK |
| | | DQHFPVFMNEKEDILWCTEMERVFGFPVHYTDVSNMSRLARQRLLG |
| | | RSWSVPVIRHLFAPLKEYFACVSSGNSNANSRGPSFSSGLVPLSLRGS |
| | | HMGPMEIYKTVSAWKRQPVRVLSLFRNIDKVLKSLGFLESGSGSGG |
| | | GTLKYVEDVTNVVRRDVEKWGPFDLVYGSTQPLGSSCDRCPGWYM |
| | | FQFHRILQYALPRQESQRPFFWIFMDNLLLTEDDQETTTRFLQTEAVT |
| | | LQDVRGRDYQNAMRVWSNIPGLKSKHAPLTPKEEEYLQAQVRSRSK |
| | | LDAPKVDLLVKNCLLPLREYFKYFSQNSLPLGGPSSGAPPPSGGSPAG |
| | | SPTSTEEGTSESATPESGPGTSTEPSEGSAPGSPAGSPTSTEEGTSTEPS |
| | | EGSAPGTSTEPSEPKKKRKVYMDKKYSIGLAIGTNSVGWAVITDEYK |
| | | VPSKKFKVLGNTDRHSIKKNLIGALLFDSGETAEATRLKRTARRRYT |
| | | RRKNRICYLQEIFSNEMAKVDDSFFHRLEESFLVEEDKKHERHPIFGN |
| | | IVDEVAYHEKYPTIYHLRKKLVDSTDKADLRLIYLALAHMIKFRGHF |
| | | LIEGDLNPDNSDVDKLFIQLVQTYNQLFEENPINASGVDAKAILSARL |
| | | SKSRRLENLIAQLPGEKKNGLFGNLIALSLGLTPNFKSNFDLAEDAKL |
| | | QLSKDTYDDDLDNLLAQIGDQYADLFLAAKNLSDAILLSDILRVNTE |
| | | ITKAPLSASMIKRYDEHHQDLTLLKALVRQQLPEKYKEIFFDQSKNG |
| | | YAGYIDGGASQEEFYKFIKPILEKMDGTEELLVKLNREDLLRKQRTF |
| | | DNGSIPHQIHLGELHAILRRQEDFYPFLKDNREKIEKILTFRIPYYVGP |
| | | LARGNSRFAWMTRKSEETITPWNFEEVVDKGASAQSFIERMTNFDK |
| | | NLPNEKVLPKHSLLYEYFTVYNELTKVKYVTEGMRKPAFLSGEQKK |
| | | AIVDLLFKTNRKVTVKQLKEDYFKKIECFDSVEISGVEDRFNASLGT |
| | | YHDLLKIIKDKDFLDNEENEDILEDIVLTLTLFEDREMIEERLKTYAH |
| | | LFDDKVMKQLKRRRYTGWGRLSRKLINGIRDKQSGKTILDFLKSDG |
| | | FANRNFMQLIHDDSLTFKEDIQKAQVSGQGDSLHEHIANLAGSPAIK |
| | | KGILQTVKVVDELVKVMGRHKPENIVIEMARENQTTQKGQKNSRER |
| | | MKRIEEGIKELGSQILKEHPVENTQLQNEKLYLYYLQNGRDMYVDQ |
| | | ELDINRLSDYDVDAIVPQSFLKDDSIDNKVLTRSDKNRGKSDNVPSE |
| | | EVVKKMKNYWRQLLNAKLITQRKFDNLTKAERGGLSELDKAGFIKR |
| | | QLVETRQITKHVAQILDSRMNTKYDENDKLIREVKVITLKSKLVSDF |
| | | RKDFQFYKVREINNYHHAHDAYLNAVVGTALIKKYPKLESEFVYGD |
| | | YKVYDVRKMIAKSEQEIGKATAKYFFYSNIMNFFKTEITLANGEIRK |
| | | RPLIETNGETGEIVWDKGRDFATVRKVLSMPQVNIVKKTEVQTGGFS |
| | | KESILPKRNSDKLIARKKDWDPKKYGGFDSPTVAYSVLVVAKVEKG |
| | | KSKKLKSVKELLGITIMERSSFEKNPIDFLEAKGYKEVKKDLIIKLPKY |
| | | SLFELENGRKRMLASAGELQKGNELALPSKYVNFLYLASHYEKLKG |
| | | SPEDNEQKQLFVEQHKHYLDEIIEQISEFSKRVILADANLDKVLSAYN |
| | | KHRDKPIREQAENIIHLFTLTNLGAPAAFKYFDTTIDRKRYTSTKEVL |
| | | DATLIHQSITGLYETRIDLSQLGGDPKKKRKVSGSETPGTSESATPEST |
| | | GMNNSQGRVTFEDVTVNFTQGEWQRLNPEQRNLYRDVMLENYSNL |
| | | VSVGQGETTKPDVILRLEQGKEPWLEEEEVLGSGRAEKNGDIGGQIW |
| | | KPKDVKESL |
| 980 | DNMT3A/ | MNHDQEFDPPKVYPPVPAEKRKPIRVLSLFDGIATGLLVLKDLGIQV |
| | L- | DRYIASEVCEDSITVGMVRHQGKIMYVGDVRSVTQKHIQEWGPFDL |
| | dSpCas9- | VIGGSPCNDLSIVNPARKGLYEGTGRLFFEFYRLLHDARPKEGDDRPF |
| | XTEN16- | FWLFENVVAMGVSDKRDISRFLESNPVMIDAKEVSAAHRARYFWG |
| | HP1b | NLPGMNRPLASTVNDKLELQECLEHGRIAKFSKVRTITTRSNSIKQGK |
| | | DQHFPVFMNEKEDILWCTEMERVFGFPVHYTDVSNMSRLARQRLLG |
| | | RSWSVPVIRHLFAPLKEYFACVSSGNSNANSRGPSFSSGLVPLSLRGS |
| | | HMGPMEIYKTVSAWKRQPVRVLSLFRNIDKVLKSLGFLESGSGSGG |
| | | GTLKYVEDVTNVVRRDVEKWGPFDLVYGSTQPLGSSCDRCPGWYM |
| | | FQFHRILQYALPRQESQRPFFWIFMDNLLLTEDDQETTTRFLQTEAVT |
| | | LQDVRGRDYQNAMRVWSNIPGLKSKHAPLTPKEEEYLQAQVRSRSK |
| | | LDAPKVDLLVKNCLLPLREYFKYFSQNSLPLGGPSSGAPPPSGGSPAG |
| | | SPTSTEEGTSESATPESGPGTSTEPSEGSAPGSPAGSPTSTEEGTSTEPS |
| | | EGSAPGTSTEPSEPKKKRKVYMDKKYSIGLAIGTNSVGWAVITDEYK |
| | | VPSKKFKVLGNTDRHSIKKNLIGALLFDSGETAEATRLKRTARRRYT |
| | | RRKNRICYLQEIFSNEMAKVDDSFFHRLEESFLVEEDKKHERHPIFGN |
| | | IVDEVAYHEKYPTIYHLRKKLVDSTDKADLRLIYLALAHMIKFRGHF |
| | | LIEGDLNPDNSDVDKLFIQLVQTYNQLFEENPINASGVDAKAILSARL |
| | | SKSRRLENLIAQLPGEKKNGLFGNLIALSLGLTPNFKSNFDLAEDAKL |
| | | QLSKDTYDDDLDNLLAQIGDQYADLFLAAKNLSDAILLSDILRVNTE |
| | | ITKAPLSASMIKRYDEHHQDLTLLKALVRQQLPEKYKEIFFDQSKNG |
| | | YAGYIDGGASQEEFYKFIKPILEKMDGTEELLVKLNREDLLRKQRTF |
| | | DNGSIPHQIHLGELHAILRRQEDFYPFLKDNREKIEKILTFRIPYYVGP |
| | | LARGNSRFAWMTRKSEETITPWNFEEVVDKGASAQSFIERMTNFDK |
| | | NLPNEKVLPKHSLLYEYFTVYNELTKVKYVTEGMRKPAFLSGEQKK |
| | | AIVDLLFKTNRKVTVKQLKEDYFKKIECFDSVEISGVEDRFNASLGT |
| | | YHDLLKIIKDKDFLDNEENEDILEDIVLTLTLFEDREMIEERLKTYAH |
| | | LFDDKVMKQLKRRRYTGWGRLSRKLINGIRDKQSGKTILDFLKSDG |
| | | FANRNFMQLIHDDSLTFKEDIQKAQVSGQGDSLHEHIANLAGSPAIK |
| | | KGILQTVKVVDELVKVMGRHKPENIVIEMARENQTTQKGQKNSRER |
| | | MKRIEEGIKELGSQILKEHPVENTQLQNEKLYLYYLQNGRDMYVDQ |
| | | ELDINRLSDYDVDAIVPQSFLKDDSIDNKVLTRSDKNRGKSDNVPSE |
| | | EVVKKMKNYWRQLLNAKLITQRKFDNLTKAERGGLSELDKAGFIKR |
| | | QLVETRQITKHVAQILDSRMNTKYDENDKLIREVKVITLKSKLVSDF |
| | | RKDFQFYKVREINNYHHAHDAYLNAVVGTALIKKYPKLESEFVYGD |
| | | YKVYDVRKMIAKSEQEIGKATAKYFFYSNIMNFFKTEITLANGEIRK |
| | | RPLIETNGETGEIVWDKGRDFATVRKVLSMPQVNIVKKTEVQTGGFS |
| | | KESILPKRNSDKLIARKKDWDPKKYGGFDSPTVAYSVLVVAKVEKG |
| | | KSKKLKSVKELLGITIMERSSFEKNPIDFLEAKGYKEVKKDLIIKLPKY |
| | | SLFELENGRKRMLASAGELQKGNELALPSKYVNFLYLASHYEKLKG |
| | | SPEDNEQKQLFVEQHKHYLDEIIEQISEFSKRVILADANLDKVLSAYN |
| | | KHRDKPIREQAENIIHLFTLTNLGAPAAFKYFDTTIDRKRYTSTKEVL |
| | | DATLIHQSITGLYETRIDLSQLGGDPKKKRKVSGSETPGTSESATPEST |
| | | GMGKKQNKKKVEEVLEEEEEEYVVEKVLDRRVVKGKVEYLLKWK |
| | | GFSDEDNTWEPEENLDCPDLIAEFLQSQKTAHETDKSEGGKRKADSD |
| | | SEDKGEESKPKKKKEESEKPRGFARGLEPERIIGATDSSGELMFLMK |
| | | WKNSDEADLVPAKEANVKCPQVVISFYEERLTWHSYPSEDDDKKD |
| | | DKN |
| 981 | DNMT3A/ | MNHDQEFDPPKVYPPVPAEKRKPIRVLSLFDGIATGLLVLKDLGIQV |
| | L- | DRYIASEVCEDSITVGMVRHQGKIMYVGDVRSVTQKHIQEWGPFDL |
| | dSpCas9- | VIGGSPCNDLSIVNPARKGLYEGTGRLFFEFYRLLHDARPKEGDDRPF |
| | XTEN16- | FWLFENVVAMGVSDKRDISRFLESNPVMIDAKEVSAAHRARYFWG |
| | RYBP | NLPGMNRPLASTVNDKLELQECLEHGRIAKFSKVRTITTRSNSIKQGK |
| | | DQHFPVFMNEKEDILWCTEMERVFGFPVHYTDVSNMSRLARQRLLG |
| | | RSWSVPVIRHLFAPLKEYFACVSSGNSNANSRGPSFSSGLVPLSLRGS |
| | | HMGPMEIYKTVSAWKRQPVRVLSLFRNIDKVLKSLGFLESGSGSGG |
| | | GTLKYVEDVTNVVRRDVEKWGPFDLVYGSTQPLGSSCDRCPGWYM |
| | | FQFHRILQYALPRQESQRPFFWIFMDNLLLTEDDQETTTRFLQTEAVT |
| | | LQDVRGRDYQNAMRVWSNIPGLKSKHAPLTPKEEEYLQAQVRSRSK |
| | | LDAPKVDLLVKNCLLPLREYFKYFSQNSLPLGGPSSGAPPPSGGSPAG |
| | | SPTSTEEGTSESATPESGPGTSTEPSEGSAPGSPAGSPTSTEEGTSTEPS |
| | | EGSAPGTSTEPSEPKKKRKVYMDKKYSIGLAIGTNSVGWAVITDEYK |
| | | VPSKKFKVLGNTDRHSIKKNLIGALLFDSGETAEATRLKRTARRRYT |
| | | RRKNRICYLQEIFSNEMAKVDDSFFHRLEESFLVEEDKKHERHPIFGN |
| | | IVDEVAYHEKYPTIYHLRKKLVDSTDKADLRLIYLALAHMIKFRGHF |
| | | LIEGDLNPDNSDVDKLFIQLVQTYNQLFEENPINASGVDAKAILSARL |
| | | SKSRRLENLIAQLPGEKKNGLFGNLIALSLGLTPNFKSNFDLAEDAKL |
| | | QLSKDTYDDDLDNLLAQIGDQYADLFLAAKNLSDAILLSDILRVNTE |
| | | ITKAPLSASMIKRYDEHHQDLTLLKALVRQQLPEKYKEIFFDQSKNG |
| | | YAGYIDGGASQEEFYKFIKPILEKMDGTEELLVKLNREDLLRKQRTF |
| | | DNGSIPHQIHLGELHAILRRQEDFYPFLKDNREKIEKILTFRIPYYVGP |
| | | LARGNSRFAWMTRKSEETITPWNFEEVVDKGASAQSFIERMTNFDK |
| | | NLPNEKVLPKHSLLYEYFTVYNELTKVKYVTEGMRKPAFLSGEQKK |
| | | AIVDLLFKTNRKVTVKQLKEDYFKKIECFDSVEISGVEDRFNASLGT |
| | | YHDLLKIIKDKDFLDNEENEDILEDIVLTLTLFEDREMIEERLKTYAH |
| | | LFDDKVMKQLKRRRYTGWGRLSRKLINGIRDKQSGKTILDFLKSDG |
| | | FANRNFMQLIHDDSLTFKEDIQKAQVSGQGDSLHEHIANLAGSPAIK |
| | | KGILQTVKVVDELVKVMGRHKPENIVIEMARENQTTQKGQKNSRER |
| | | MKRIEEGIKELGSQILKEHPVENTQLQNEKLYLYYLQNGRDMYVDQ |
| | | ELDINRLSDYDVDAIVPQSFLKDDSIDNKVLTRSDKNRGKSDNVPSE |
| | | EVVKKMKNYWRQLLNAKLITQRKFDNLTKAERGGLSELDKAGFIKR |
| | | QLVETRQITKHVAQILDSRMNTKYDENDKLIREVKVITLKSKLVSDF |
| | | RKDFQFYKVREINNYHHAHDAYLNAVVGTALIKKYPKLESEFVYGD |
| | | YKVYDVRKMIAKSEQEIGKATAKYFFYSNIMNFFKTEITLANGEIRK |
| | | RPLIETNGETGEIVWDKGRDFATVRKVLSMPQVNIVKKTEVQTGGFS |
| | | KESILPKRNSDKLIARKKDWDPKKYGGFDSPTVAYSVLVVAKVEKG |
| | | KSKKLKSVKELLGITIMERSSFEKNPIDFLEAKGYKEVKKDLIIKLPKY |
| | | SLFELENGRKRMLASAGELQKGNELALPSKYVNFLYLASHYEKLKG |
| | | SPEDNEQKQLFVEQHKHYLDEIIEQISEFSKRVILADANLDKVLSAYN |
| | | KHRDKPIREQAENIIHLFTLTNLGAPAAFKYFDTTIDRKRYTSTKEVL |
| | | DATLIHQSITGLYETRIDLSQLGGDPKKKRKVSGSETPGTSESATPEST |
| | | GPSEANSIQSANATTKTSETNHTSRPRLKNVDRSTAQQLAVTVGNVT |
| | | VIITDFKEKTRSSSTSSSTVTSSAGSEQQNQSSS |
| 982 | DNMT3A/ | MNHDQEFDPPKVYPPVPAEKRKPIRVLSLFDGIATGLLVLKDLGIQV |
| | L- | DRYIASEVCEDSITVGMVRHQGKIMYVGDVRSVTQKHIQEWGPFDL |
| | dSpCas9- | VIGGSPCNDLSIVNPARKGLYEGTGRLFFEFYRLLHDARPKEGDDRPF |
| | XTEN16- | FWLFENVVAMGVSDKRDISRFLESNPVMIDAKEVSAAHRARYFWG |
| | ZFP28 | NLPGMNRPLASTVNDKLELQECLEHGRIAKFSKVRTITTRSNSIKQGK |
| | | DQHFPVFMNEKEDILWCTEMERVFGFPVHYTDVSNMSRLARQRLLG |
| | | RSWSVPVIRHLFAPLKEYFACVSSGNSNANSRGPSFSSGLVPLSLRGS |
| | | HMGPMEIYKTVSAWKRQPVRVLSLFRNIDKVLKSLGFLESGSGSGG |
| | | GTLKYVEDVTNVVRRDVEKWGPFDLVYGSTQPLGSSCDRCPGWYM |
| | | FQFHRILQYALPRQESQRPFFWIFMDNLLLTEDDQETTTRFLQTEAVT |
| | | LQDVRGRDYQNAMRVWSNIPGLKSKHAPLTPKEEEYLQAQVRSRSK |
| | | LDAPKVDLLVKNCLLPLREYFKYFSQNSLPLGGPSSGAPPPSGGSPAG |
| | | SPTSTEEGTSESATPESGPGTSTEPSEGSAPGSPAGSPTSTEEGTSTEPS |
| | | EGSAPGTSTEPSEPKKKRKVYMDKKYSIGLAIGTNSVGWAVITDEYK |
| | | VPSKKFKVLGNTDRHSIKKNLIGALLFDSGETAEATRLKRTARRRYT |
| | | RRKNRICYLQEIFSNEMAKVDDSFFHRLEESFLVEEDKKHERHPIFGN |
| | | IVDEVAYHEKYPTIYHLRKKLVDSTDKADLRLIYLALAHMIKFRGHF |
| | | LIEGDLNPDNSDVDKLFIQLVQTYNQLFEENPINASGVDAKAILSARL |
| | | SKSRRLENLIAQLPGEKKNGLFGNLIALSLGLTPNFKSNFDLAEDAKL |
| | | QLSKDTYDDDLDNLLAQIGDQYADLFLAAKNLSDAILLSDILRVNTE |
| | | ITKAPLSASMIKRYDEHHQDLTLLKALVRQQLPEKYKEIFFDQSKNG |
| | | YAGYIDGGASQEEFYKFIKPILEKMDGTEELLVKLNREDLLRKQRTF |
| | | DNGSIPHQIHLGELHAILRRQEDFYPFLKDNREKIEKILTFRIPYYVGP |
| | | LARGNSRFAWMTRKSEETITPWNFEEVVDKGASAQSFIERMTNFDK |
| | | NLPNEKVLPKHSLLYEYFTVYNELTKVKYVTEGMRKPAFLSGEQKK |
| | | AIVDLLFKTNRKVTVKQLKEDYFKKIECFDSVEISGVEDRFNASLGT |
| | | YHDLLKIIKDKDFLDNEENEDILEDIVLTLTLFEDREMIEERLKTYAH |
| | | LFDDKVMKQLKRRRYTGWGRLSRKLINGIRDKQSGKTILDFLKSDG |
| | | FANRNFMQLIHDDSLTFKEDIQKAQVSGQGDSLHEHIANLAGSPAIK |
| | | KGILQTVKVVDELVKVMGRHKPENIVIEMARENQTTQKGQKNSRER |
| | | MKRIEEGIKELGSQILKEHPVENTQLQNEKLYLYYLQNGRDMYVDQ |
| | | ELDINRLSDYDVDAIVPQSFLKDDSIDNKVLTRSDKNRGKSDNVPSE |
| | | EVVKKMKNYWRQLLNAKLITQRKFDNLTKAERGGLSELDKAGFIKR |
| | | QLVETRQITKHVAQILDSRMNTKYDENDKLIREVKVITLKSKLVSDF |
| | | RKDFQFYKVREINNYHHAHDAYLNAVVGTALIKKYPKLESEFVYGD |
| | | YKVYDVRKMIAKSEQEIGKATAKYFFYSNIMNFFKTEITLANGEIRK |
| | | RPLIETNGETGEIVWDKGRDFATVRKVLSMPQVNIVKKTEVQTGGFS |
| | | KESILPKRNSDKLIARKKDWDPKKYGGFDSPTVAYSVLVVAKVEKG |
| | | KSKKLKSVKELLGITIMERSSFEKNPIDFLEAKGYKEVKKDLIIKLPKY |
| | | SLFELENGRKRMLASAGELQKGNELALPSKYVNFLYLASHYEKLKG |
| | | SPEDNEQKQLFVEQHKHYLDEIIEQISEFSKRVILADANLDKVLSAYN |
| | | KHRDKPIREQAENIIHLFTLTNLGAPAAFKYFDTTIDRKRYTSTKEVL |
| | | DATLIHQSITGLYETRIDLSQLGGDPKKKRKVSGSETPGTSESATPEST |
| | | GNKKLEAVGTGIEPKAMSQGLVTFGDVAVDFSQEEWEWLNPIQRNL |
| | | YRKVMLENYRNLASLGLCVSKPDVISSLEQGKEPW |
| 983 | DNMT3A/ | MNHDQEFDPPKVYPPVPAEKRKPIRVLSLFDGIATGLLVLKDLGIQV |
| | L- | DRYIASEVCEDSITVGMVRHQGKIMYVGDVRSVTQKHIQEWGPFDL |
| | dSpCas9- | VIGGSPCNDLSIVNPARKGLYEGTGRLFFEFYRLLHDARPKEGDDRPF |
| | XTEN16- | FWLFENVVAMGVSDKRDISRFLESNPVMIDAKEVSAAHRARYFWG |
| | ZN627 | NLPGMNRPLASTVNDKLELQECLEHGRIAKFSKVRTITTRSNSIKQGK |
| | | DQHFPVFMNEKEDILWCTEMERVFGFPVHYTDVSNMSRLARQRLLG |
| | | RSWSVPVIRHLFAPLKEYFACVSSGNSNANSRGPSFSSGLVPLSLRGS |
| | | HMGPMEIYKTVSAWKRQPVRVLSLFRNIDKVLKSLGFLESGSGSGG |
| | | GTLKYVEDVTNVVRRDVEKWGPFDLVYGSTQPLGSSCDRCPGWYM |
| | | FQFHRILQYALPRQESQRPFFWIFMDNLLLTEDDQETTTRFLQTEAVT |
| | | LQDVRGRDYQNAMRVWSNIPGLKSKHAPLTPKEEEYLQAQVRSRSK |
| | | LDAPKVDLLVKNCLLPLREYFKYFSQNSLPLGGPSSGAPPPSGGSPAG |
| | | SPTSTEEGTSESATPESGPGTSTEPSEGSAPGSPAGSPTSTEEGTSTEPS |
| | | EGSAPGTSTEPSEPKKKRKVYMDKKYSIGLAIGTNSVGWAVITDEYK |
| | | VPSKKFKVLGNTDRHSIKKNLIGALLFDSGETAEATRLKRTARRRYT |
| | | RRKNRICYLQEIFSNEMAKVDDSFFHRLEESFLVEEDKKHERHPIFGN |
| | | IVDEVAYHEKYPTIYHLRKKLVDSTDKADLRLIYLALAHMIKFRGHF |
| | | LIEGDLNPDNSDVDKLFIQLVQTYNQLFEENPINASGVDAKAILSARL |
| | | SKSRRLENLIAQLPGEKKNGLFGNLIALSLGLTPNFKSNFDLAEDAKL |
| | | QLSKDTYDDDLDNLLAQIGDQYADLFLAAKNLSDAILLSDILRVNTE |
| | | ITKAPLSASMIKRYDEHHQDLTLLKALVRQQLPEKYKEIFFDQSKNG |
| | | YAGYIDGGASQEEFYKFIKPILEKMDGTEELLVKLNREDLLRKQRTF |
| | | DNGSIPHQIHLGELHAILRRQEDFYPFLKDNREKIEKILTFRIPYYVGP |
| | | LARGNSRFAWMTRKSEETITPWNFEEVVDKGASAQSFIERMTNFDK |
| | | NLPNEKVLPKHSLLYEYFTVYNELTKVKYVTEGMRKPAFLSGEQKK |
| | | AIVDLLFKTNRKVTVKQLKEDYFKKIECFDSVEISGVEDRFNASLGT |
| | | YHDLLKIIKDKDFLDNEENEDILEDIVLTLTLFEDREMIEERLKTYAH |
| | | LFDDKVMKQLKRRRYTGWGRLSRKLINGIRDKQSGKTILDFLKSDG |
| | | FANRNFMQLIHDDSLTFKEDIQKAQVSGQGDSLHEHIANLAGSPAIK |
| | | KGILQTVKVVDELVKVMGRHKPENIVIEMARENQTTQKGQKNSRER |
| | | MKRIEEGIKELGSQILKEHPVENTQLQNEKLYLYYLQNGRDMYVDQ |
| | | ELDINRLSDYDVDAIVPQSFLKDDSIDNKVLTRSDKNRGKSDNVPSE |
| | | EVVKKMKNYWRQLLNAKLITQRKFDNLTKAERGGLSELDKAGFIKR |
| | | QLVETRQITKHVAQILDSRMNTKYDENDKLIREVKVITLKSKLVSDF |
| | | RKDFQFYKVREINNYHHAHDAYLNAVVGTALIKKYPKLESEFVYGD |
| | | YKVYDVRKMIAKSEQEIGKATAKYFFYSNIMNFFKTEITLANGEIRK |
| | | RPLIETNGETGEIVWDKGRDFATVRKVLSMPQVNIVKKTEVQTGGFS |
| | | KESILPKRNSDKLIARKKDWDPKKYGGFDSPTVAYSVLVVAKVEKG |
| | | KSKKLKSVKELLGITIMERSSFEKNPIDFLEAKGYKEVKKDLIIKLPKY |
| | | SLFELENGRKRMLASAGELQKGNELALPSKYVNFLYLASHYEKLKG |
| | | SPEDNEQKQLFVEQHKHYLDEIIEQISEFSKRVILADANLDKVLSAYN |
| | | KHRDKPIREQAENIIHLFTLTNLGAPAAFKYFDTTIDRKRYTSTKEVL |
| | | DATLIHQSITGLYETRIDLSQLGGDPKKKRKVSGSETPGTSESATPEST |
| | | GDSVAFEDVAVNFTLEEWALLDPSQKNLYRDVMRETFRNLASVGK |
| | | QWEDQNIEDPFKIPRRNISHIPERLCESKEGGQGEE |
| 984 | DNMT3A/ | MNHDQEFDPPKVYPPVPAEKRKPIRVLSLFDGIATGLLVLKDLGIQV |
| | L- | DRYIASEVCEDSITVGMVRHQGKIMYVGDVRSVTQKHIQEWGPFDL |
| | dSpCas9- | VIGGSPCNDLSIVNPARKGLYEGTGRLFFEFYRLLHDARPKEGDDRPF |
| | XTEN16- | FWLFENVVAMGVSDKRDISRFLESNPVMIDAKEVSAAHRARYFWG |
| | CDYL2 | NLPGMNRPLASTVNDKLELQECLEHGRIAKFSKVRTITTRSNSIKQGK |
| | | DQHFPVFMNEKEDILWCTEMERVFGFPVHYTDVSNMSRLARQRLLG |
| | | RSWSVPVIRHLFAPLKEYFACVSSGNSNANSRGPSFSSGLVPLSLRGS |
| | | HMGPMEIYKTVSAWKRQPVRVLSLFRNIDKVLKSLGFLESGSGSGG |
| | | GTLKYVEDVTNVVRRDVEKWGPFDLVYGSTQPLGSSCDRCPGWYM |
| | | FQFHRILQYALPRQESQRPFFWIFMDNLLLTEDDQETTTRFLQTEAVT |
| | | LQDVRGRDYQNAMRVWSNIPGLKSKHAPLTPKEEEYLQAQVRSRSK |
| | | LDAPKVDLLVKNCLLPLREYFKYFSQNSLPLGGPSSGAPPPSGGSPAG |
| | | SPTSTEEGTSESATPESGPGTSTEPSEGSAPGSPAGSPTSTEEGTSTEPS |
| | | EGSAPGTSTEPSEPKKKRKVYMDKKYSIGLAIGTNSVGWAVITDEYK |
| | | VPSKKFKVLGNTDRHSIKKNLIGALLFDSGETAEATRLKRTARRRYT |
| | | RRKNRICYLQEIFSNEMAKVDDSFFHRLEESFLVEEDKKHERHPIFGN |
| | | IVDEVAYHEKYPTIYHLRKKLVDSTDKADLRLIYLALAHMIKFRGHF |
| | | LIEGDLNPDNSDVDKLFIQLVQTYNQLFEENPINASGVDAKAILSARL |
| | | SKSRRLENLIAQLPGEKKNGLFGNLIALSLGLTPNFKSNFDLAEDAKL |
| | | QLSKDTYDDDLDNLLAQIGDQYADLFLAAKNLSDAILLSDILRVNTE |
| | | ITKAPLSASMIKRYDEHHQDLTLLKALVRQQLPEKYKEIFFDQSKNG |
| | | YAGYIDGGASQEEFYKFIKPILEKMDGTEELLVKLNREDLLRKQRTF |
| | | DNGSIPHQIHLGELHAILRRQEDFYPFLKDNREKIEKILTFRIPYYVGP |
| | | LARGNSRFAWMTRKSEETITPWNFEEVVDKGASAQSFIERMTNFDK |
| | | NLPNEKVLPKHSLLYEYFTVYNELTKVKYVTEGMRKPAFLSGEQKK |
| | | AIVDLLFKTNRKVTVKQLKEDYFKKIECFDSVEISGVEDRFNASLGT |
| | | YHDLLKIIKDKDFLDNEENEDILEDIVLTLTLFEDREMIEERLKTYAH |
| | | LFDDKVMKQLKRRRYTGWGRLSRKLINGIRDKQSGKTILDFLKSDG |
| | | FANRNFMQLIHDDSLTFKEDIQKAQVSGQGDSLHEHIANLAGSPAIK |
| | | KGILQTVKVVDELVKVMGRHKPENIVIEMARENQTTQKGQKNSRER |
| | | MKRIEEGIKELGSQILKEHPVENTQLQNEKLYLYYLQNGRDMYVDQ |
| | | ELDINRLSDYDVDAIVPQSFLKDDSIDNKVLTRSDKNRGKSDNVPSE |
| | | EVVKKMKNYWRQLLNAKLITQRKFDNLTKAERGGLSELDKAGFIKR |
| | | QLVETRQITKHVAQILDSRMNTKYDENDKLIREVKVITLKSKLVSDF |
| | | RKDFQFYKVREINNYHHAHDAYLNAVVGTALIKKYPKLESEFVYGD |
| | | YKVYDVRKMIAKSEQEIGKATAKYFFYSNIMNFFKTEITLANGEIRK |
| | | RPLIETNGETGEIVWDKGRDFATVRKVLSMPQVNIVKKTEVQTGGFS |
| | | KESILPKRNSDKLIARKKDWDPKKYGGFDSPTVAYSVLVVAKVEKG |
| | | KSKKLKSVKELLGITIMERSSFEKNPIDFLEAKGYKEVKKDLIIKLPKY |
| | | SLFELENGRKRMLASAGELQKGNELALPSKYVNFLYLASHYEKLKG |
| | | SPEDNEQKQLFVEQHKHYLDEIIEQISEFSKRVILADANLDKVLSAYN |
| | | KHRDKPIREQAENIIHLFTLTNLGAPAAFKYFDTTIDRKRYTSTKEVL |
| | | DATLIHQSITGLYETRIDLSQLGGDPKKKRKVSGSETPGTSESATPEST |
| | | GASGDLYEVERIVDKRKNKKGKWEYLIRWKGYGSTEDTWEPEHHL |
| | | LHCEEFIDEFNGLHMSKDKRIKSGKQSSTSKLLRDS |
| 985 | DNMT3A/ | MNHDQEFDPPKVYPPVPAEKRKPIRVLSLFDGIATGLLVLKDLGIQV |
| | L- | DRYIASEVCEDSITVGMVRHQGKIMYVGDVRSVTQKHIQEWGPFDL |
| | dSpCas9- | VIGGSPCNDLSIVNPARKGLYEGTGRLFFEFYRLLHDARPKEGDDRPF |
| | XTEN16- | FWLFENVVAMGVSDKRDISRFLESNPVMIDAKEVSAAHRARYFWG |
| | TOX | NLPGMNRPLASTVNDKLELQECLEHGRIAKFSKVRTITTRSNSIKQGK |
| | | DQHFPVFMNEKEDILWCTEMERVFGFPVHYTDVSNMSRLARQRLLG |
| | | RSWSVPVIRHLFAPLKEYFACVSSGNSNANSRGPSFSSGLVPLSLRGS |
| | | HMGPMEIYKTVSAWKRQPVRVLSLFRNIDKVLKSLGFLESGSGSGG |
| | | GTLKYVEDVTNVVRRDVEKWGPFDLVYGSTQPLGSSCDRCPGWYM |
| | | FQFHRILQYALPRQESQRPFFWIFMDNLLLTEDDQETTTRFLQTEAVT |
| | | LQDVRGRDYQNAMRVWSNIPGLKSKHAPLTPKEEEYLQAQVRSRSK |
| | | LDAPKVDLLVKNCLLPLREYFKYFSQNSLPLGGPSSGAPPPSGGSPAG |
| | | SPTSTEEGTSESATPESGPGTSTEPSEGSAPGSPAGSPTSTEEGTSTEPS |
| | | EGSAPGTSTEPSEPKKKRKVYMDKKYSIGLAIGTNSVGWAVITDEYK |
| | | VPSKKFKVLGNTDRHSIKKNLIGALLFDSGETAEATRLKRTARRRYT |
| | | RRKNRICYLQEIFSNEMAKVDDSFFHRLEESFLVEEDKKHERHPIFGN |
| | | IVDEVAYHEKYPTIYHLRKKLVDSTDKADLRLIYLALAHMIKFRGHF |
| | | LIEGDLNPDNSDVDKLFIQLVQTYNQLFEENPINASGVDAKAILSARL |
| | | SKSRRLENLIAQLPGEKKNGLFGNLIALSLGLTPNFKSNFDLAEDAKL |
| | | QLSKDTYDDDLDNLLAQIGDQYADLFLAAKNLSDAILLSDILRVNTE |
| | | ITKAPLSASMIKRYDEHHQDLTLLKALVRQQLPEKYKEIFFDQSKNG |
| | | YAGYIDGGASQEEFYKFIKPILEKMDGTEELLVKLNREDLLRKQRTF |
| | | DNGSIPHQIHLGELHAILRRQEDFYPFLKDNREKIEKILTFRIPYYVGP |
| | | LARGNSRFAWMTRKSEETITPWNFEEVVDKGASAQSFIERMTNFDK |
| | | NLPNEKVLPKHSLLYEYFTVYNELTKVKYVTEGMRKPAFLSGEQKK |
| | | AIVDLLFKTNRKVTVKQLKEDYFKKIECFDSVEISGVEDRFNASLGT |
| | | YHDLLKIIKDKDFLDNEENEDILEDIVLTLTLFEDREMIEERLKTYAH |
| | | LFDDKVMKQLKRRRYTGWGRLSRKLINGIRDKQSGKTILDFLKSDG |
| | | FANRNFMQLIHDDSLTFKEDIQKAQVSGQGDSLHEHIANLAGSPAIK |
| | | KGILQTVKVVDELVKVMGRHKPENIVIEMARENQTTQKGQKNSRER |
| | | MKRIEEGIKELGSQILKEHPVENTQLQNEKLYLYYLQNGRDMYVDQ |
| | | ELDINRLSDYDVDAIVPQSFLKDDSIDNKVLTRSDKNRGKSDNVPSE |
| | | EVVKKMKNYWRQLLNAKLITQRKFDNLTKAERGGLSELDKAGFIKR |
| | | QLVETRQITKHVAQILDSRMNTKYDENDKLIREVKVITLKSKLVSDF |
| | | RKDFQFYKVREINNYHHAHDAYLNAVVGTALIKKYPKLESEFVYGD |
| | | YKVYDVRKMIAKSEQEIGKATAKYFFYSNIMNFFKTEITLANGEIRK |
| | | RPLIETNGETGEIVWDKGRDFATVRKVLSMPQVNIVKKTEVQTGGFS |
| | | KESILPKRNSDKLIARKKDWDPKKYGGFDSPTVAYSVLVVAKVEKG |
| | | KSKKLKSVKELLGITIMERSSFEKNPIDFLEAKGYKEVKKDLIIKLPKY |
| | | SLFELENGRKRMLASAGELQKGNELALPSKYVNFLYLASHYEKLKG |
| | | SPEDNEQKQLFVEQHKHYLDEIIEQISEFSKRVILADANLDKVLSAYN |
| | | KHRDKPIREQAENIIHLFTLTNLGAPAAFKYFDTTIDRKRYTSTKEVL |
| | | DATLIHQSITGLYETRIDLSQLGGDPKKKRKVSGSETPGTSESATPEST |
| | | GKDPNEPQKPVSAYALFFRDTQAAIKGQNPNATFGEVSKIVASMWD |
| | | GLGEEQKQVYKKKTEAAKKEYLKQLAAYRASLVSK |
| | | MNHDQEFDPPKVYPPVPAEKRKPIRVLSLFDGIATGLLVLKDLGIQV |
| | | DRYIASEVCEDSITVGMVRHQGKIMYVGDVRSVTQKHIQEWGPFDL |
| | | VIGGSPCNDLSIVNPARKGLYEGTGRLFFEFYRLLHDARPKEGDDRPF |
| | | FWLFENVVAMGVSDKRDISRFLESNPVMIDAKEVSAAHRARYFWG |
| 986 | DNMT3A/ | NLPGMNRPLASTVNDKLELQECLEHGRIAKFSKVRTITTRSNSIKQGK |
| | L- | DQHFPVFMNEKEDILWCTEMERVFGFPVHYTDVSNMSRLARQRLLG |
| | dSpCas9- | RSWSVPVIRHLFAPLKEYFACVSSGNSNANSRGPSFSSGLVPLSLRGS |
| | XTEN16- | HMGPMEIYKTVSAWKRQPVRVLSLFRNIDKVLKSLGFLESGSGSGG |
| | SCMH1 | GTLKYVEDVTNVVRRDVEKWGPFDLVYGSTQPLGSSCDRCPGWYM |
| | | FQFHRILQYALPRQESQRPFFWIFMDNLLLTEDDQETTTRFLQTEAVT |
| | | LQDVRGRDYQNAMRVWSNIPGLKSKHAPLTPKEEEYLQAQVRSRSK |
| | | LDAPKVDLLVKNCLLPLREYFKYFSQNSLPLGGPSSGAPPPSGGSPAG |
| | | SPTSTEEGTSESATPESGPGTSTEPSEGSAPGSPAGSPTSTEEGTSTEPS |
| | | EGSAPGTSTEPSEPKKKRKVYMDKKYSIGLAIGTNSVGWAVITDEYK |
| | | VPSKKFKVLGNTDRHSIKKNLIGALLFDSGETAEATRLKRTARRRYT |
| | | RRKNRICYLQEIFSNEMAKVDDSFFHRLEESFLVEEDKKHERHPIFGN |
| | | IVDEVAYHEKYPTIYHLRKKLVDSTDKADLRLIYLALAHMIKFRGHF |
| | | LIEGDLNPDNSDVDKLFIQLVQTYNQLFEENPINASGVDAKAILSARL |
| | | SKSRRLENLIAQLPGEKKNGLFGNLIALSLGLTPNFKSNFDLAEDAKL |
| | | QLSKDTYDDDLDNLLAQIGDQYADLFLAAKNLSDAILLSDILRVNTE |
| | | ITKAPLSASMIKRYDEHHQDLTLLKALVRQQLPEKYKEIFFDQSKNG |
| | | YAGYIDGGASQEEFYKFIKPILEKMDGTEELLVKLNREDLLRKQRTF |
| | | DNGSIPHQIHLGELHAILRRQEDFYPFLKDNREKIEKILTFRIPYYVGP |
| | | LARGNSRFAWMTRKSEETITPWNFEEVVDKGASAQSFIERMTNFDK |
| | | NLPNEKVLPKHSLLYEYFTVYNELTKVKYVTEGMRKPAFLSGEQKK |
| | | AIVDLLFKTNRKVTVKQLKEDYFKKIECFDSVEISGVEDRFNASLGT |
| | | YHDLLKIIKDKDFLDNEENEDILEDIVLTLTLFEDREMIEERLKTYAH |
| | | LFDDKVMKQLKRRRYTGWGRLSRKLINGIRDKQSGKTILDFLKSDG |
| | | FANRNFMQLIHDDSLTFKEDIQKAQVSGQGDSLHEHIANLAGSPAIK |
| | | KGILQTVKVVDELVKVMGRHKPENIVIEMARENQTTQKGQKNSRER |
| | | MKRIEEGIKELGSQILKEHPVENTQLQNEKLYLYYLQNGRDMYVDQ |
| | | ELDINRLSDYDVDAIVPQSFLKDDSIDNKVLTRSDKNRGKSDNVPSE |
| | | EVVKKMKNYWRQLLNAKLITQRKFDNLTKAERGGLSELDKAGFIKR |
| | | QLVETRQITKHVAQILDSRMNTKYDENDKLIREVKVITLKSKLVSDF |
| | | RKDFQFYKVREINNYHHAHDAYLNAVVGTALIKKYPKLESEFVYGD |
| | | YKVYDVRKMIAKSEQEIGKATAKYFFYSNIMNFFKTEITLANGEIRK |
| | | RPLIETNGETGEIVWDKGRDFATVRKVLSMPQVNIVKKTEVQTGGFS |
| | | KESILPKRNSDKLIARKKDWDPKKYGGFDSPTVAYSVLVVAKVEKG |
| | | KSKKLKSVKELLGITIMERSSFEKNPIDFLEAKGYKEVKKDLIIKLPKY |
| | | SLFELENGRKRMLASAGELQKGNELALPSKYVNFLYLASHYEKLKG |
| | | SPEDNEQKQLFVEQHKHYLDEIIEQISEFSKRVILADANLDKVLSAYN |
| | | KHRDKPIREQAENIIHLFTLTNLGAPAAFKYFDTTIDRKRYTSTKEVL |
| | | DATLIHQSITGLYETRIDLSQLGGDPKKKRKVSGSETPGTSESATPEST |
| | | GDASRLSGRDPSSWTVEDVMQFVREADPQLGPHADLFRKHEIDGKA |
| | | LLLLRSDMMMKYMGLKLGPALKLSYHIDRLKQGKF |
| 987 | DNMT3A/ | MNHDQEFDPPKVYPPVPAEKRKPIRVLSLFDGIATGLLVLKDLGIQV |
| | L- | DRYIASEVCEDSITVGMVRHQGKIMYVGDVRSVTQKHIQEWGPFDL |
| | dSpCas9- | VIGGSPCNDLSIVNPARKGLYEGTGRLFFEFYRLLHDARPKEGDDRPF |
| | XTEN16- | FWLFENVVAMGVSDKRDISRFLESNPVMIDAKEVSAAHRARYFWG |
| | SCML2 | NLPGMNRPLASTVNDKLELQECLEHGRIAKFSKVRTITTRSNSIKQGK |
| | | DQHFPVFMNEKEDILWCTEMERVFGFPVHYTDVSNMSRLARQRLLG |
| | | RSWSVPVIRHLFAPLKEYFACVSSGNSNANSRGPSFSSGLVPLSLRGS |
| | | HMGPMEIYKTVSAWKRQPVRVLSLFRNIDKVLKSLGFLESGSGSGG |
| | | GTLKYVEDVTNVVRRDVEKWGPFDLVYGSTQPLGSSCDRCPGWYM |
| | | FQFHRILQYALPRQESQRPFFWIFMDNLLLTEDDQETTTRFLQTEAVT |
| | | LQDVRGRDYQNAMRVWSNIPGLKSKHAPLTPKEEEYLQAQVRSRSK |
| | | LDAPKVDLLVKNCLLPLREYFKYFSQNSLPLGGPSSGAPPPSGGSPAG |
| | | SPTSTEEGTSESATPESGPGTSTEPSEGSAPGSPAGSPTSTEEGTSTEPS |
| | | EGSAPGTSTEPSEPKKKRKVYMDKKYSIGLAIGTNSVGWAVITDEYK |
| | | VPSKKFKVLGNTDRHSIKKNLIGALLFDSGETAEATRLKRTARRRYT |
| | | RRKNRICYLQEIFSNEMAKVDDSFFHRLEESFLVEEDKKHERHPIFGN |
| | | IVDEVAYHEKYPTIYHLRKKLVDSTDKADLRLIYLALAHMIKFRGHF |
| | | LIEGDLNPDNSDVDKLFIQLVQTYNQLFEENPINASGVDAKAILSARL |
| | | SKSRRLENLIAQLPGEKKNGLFGNLIALSLGLTPNFKSNFDLAEDAKL |
| | | QLSKDTYDDDLDNLLAQIGDQYADLFLAAKNLSDAILLSDILRVNTE |
| | | ITKAPLSASMIKRYDEHHQDLTLLKALVRQQLPEKYKEIFFDQSKNG |
| | | YAGYIDGGASQEEFYKFIKPILEKMDGTEELLVKLNREDLLRKQRTF |
| | | DNGSIPHQIHLGELHAILRRQEDFYPFLKDNREKIEKILTFRIPYYVGP |
| | | LARGNSRFAWMTRKSEETITPWNFEEVVDKGASAQSFIERMTNFDK |
| | | NLPNEKVLPKHSLLYEYFTVYNELTKVKYVTEGMRKPAFLSGEQKK |
| | | AIVDLLFKTNRKVTVKQLKEDYFKKIECFDSVEISGVEDRFNASLGT |
| | | YHDLLKIIKDKDFLDNEENEDILEDIVLTLTLFEDREMIEERLKTYAH |
| | | LFDDKVMKQLKRRRYTGWGRLSRKLINGIRDKQSGKTILDFLKSDG |
| | | FANRNFMQLIHDDSLTFKEDIQKAQVSGQGDSLHEHIANLAGSPAIK |
| | | KGILQTVKVVDELVKVMGRHKPENIVIEMARENQTTQKGQKNSRER |
| | | MKRIEEGIKELGSQILKEHPVENTQLQNEKLYLYYLQNGRDMYVDQ |
| | | ELDINRLSDYDVDAIVPQSFLKDDSIDNKVLTRSDKNRGKSDNVPSE |
| | | EVVKKMKNYWRQLLNAKLITQRKFDNLTKAERGGLSELDKAGFIKR |
| | | QLVETRQITKHVAQILDSRMNTKYDENDKLIREVKVITLKSKLVSDF |
| | | RKDFQFYKVREINNYHHAHDAYLNAVVGTALIKKYPKLESEFVYGD |
| | | YKVYDVRKMIAKSEQEIGKATAKYFFYSNIMNFFKTEITLANGEIRK |
| | | RPLIETNGETGEIVWDKGRDFATVRKVLSMPQVNIVKKTEVQTGGFS |
| | | KESILPKRNSDKLIARKKDWDPKKYGGFDSPTVAYSVLVVAKVEKG |
| | | KSKKLKSVKELLGITIMERSSFEKNPIDFLEAKGYKEVKKDLIIKLPKY |
| | | SLFELENGRKRMLASAGELQKGNELALPSKYVNFLYLASHYEKLKG |
| | | SPEDNEQKQLFVEQHKHYLDEIIEQISEFSKRVILADANLDKVLSAYN |
| | | KHRDKPIREQAENIIHLFTLTNLGAPAAFKYFDTTIDRKRYTSTKEVL |
| | | DATLIHQSITGLYETRIDLSQLGGDPKKKRKVSGSETPGTSESATPEST |
| | | GKQGFSKDPSTWSVDEVIQFMKHTDPQISGPLADLFRQHEIDGKALF |
| | | LLKSDVMMKYMGLKLGPALKLCYYIEKLKEGKYS |
| 988 | DNMT3A/ | MNHDQEFDPPKVYPPVPAEKRKPIRVLSLFDGIATGLLVLKDLGIQV |
| | L- | DRYIASEVCEDSITVGMVRHQGKIMYVGDVRSVTQKHIQEWGPFDL |
| | dSpCas9- | VIGGSPCNDLSIVNPARKGLYEGTGRLFFEFYRLLHDARPKEGDDRPF |
| | XTEN16- | FWLFENVVAMGVSDKRDISRFLESNPVMIDAKEVSAAHRARYFWG |
| | CBX8 | NLPGMNRPLASTVNDKLELQECLEHGRIAKFSKVRTITTRSNSIKQGK |
| | | DQHFPVFMNEKEDILWCTEMERVFGFPVHYTDVSNMSRLARQRLLG |
| | | RSWSVPVIRHLFAPLKEYFACVSSGNSNANSRGPSFSSGLVPLSLRGS |
| | | HMGPMEIYKTVSAWKRQPVRVLSLFRNIDKVLKSLGFLESGSGSGG |
| | | GTLKYVEDVTNVVRRDVEKWGPFDLVYGSTQPLGSSCDRCPGWYM |
| | | FQFHRILQYALPRQESQRPFFWIFMDNLLLTEDDQETTTRFLQTEAVT |
| | | LQDVRGRDYQNAMRVWSNIPGLKSKHAPLTPKEEEYLQAQVRSRSK |
| | | LDAPKVDLLVKNCLLPLREYFKYFSQNSLPLGGPSSGAPPPSGGSPAG |
| | | SPTSTEEGTSESATPESGPGTSTEPSEGSAPGSPAGSPTSTEEGTSTEPS |
| | | EGSAPGTSTEPSEPKKKRKVYMDKKYSIGLAIGTNSVGWAVITDEYK |
| | | VPSKKFKVLGNTDRHSIKKNLIGALLFDSGETAEATRLKRTARRRYT |
| | | RRKNRICYLQEIFSNEMAKVDDSFFHRLEESFLVEEDKKHERHPIFGN |
| | | IVDEVAYHEKYPTIYHLRKKLVDSTDKADLRLIYLALAHMIKFRGHF |
| | | LIEGDLNPDNSDVDKLFIQLVQTYNQLFEENPINASGVDAKAILSARL |
| | | SKSRRLENLIAQLPGEKKNGLFGNLIALSLGLTPNFKSNFDLAEDAKL |
| | | QLSKDTYDDDLDNLLAQIGDQYADLFLAAKNLSDAILLSDILRVNTE |
| | | ITKAPLSASMIKRYDEHHQDLTLLKALVRQQLPEKYKEIFFDQSKNG |
| | | YAGYIDGGASQEEFYKFIKPILEKMDGTEELLVKLNREDLLRKQRTF |
| | | DNGSIPHQIHLGELHAILRRQEDFYPFLKDNREKIEKILTFRIPYYVGP |
| | | LARGNSRFAWMTRKSEETITPWNFEEVVDKGASAQSFIERMTNFDK |
| | | NLPNEKVLPKHSLLYEYFTVYNELTKVKYVTEGMRKPAFLSGEQKK |
| | | AIVDLLFKTNRKVTVKQLKEDYFKKIECFDSVEISGVEDRFNASLGT |
| | | YHDLLKIIKDKDFLDNEENEDILEDIVLTLTLFEDREMIEERLKTYAH |
| | | LFDDKVMKQLKRRRYTGWGRLSRKLINGIRDKQSGKTILDFLKSDG |
| | | FANRNFMQLIHDDSLTFKEDIQKAQVSGQGDSLHEHIANLAGSPAIK |
| | | KGILQTVKVVDELVKVMGRHKPENIVIEMARENQTTQKGQKNSRER |
| | | MKRIEEGIKELGSQILKEHPVENTQLQNEKLYLYYLQNGRDMYVDQ |
| | | ELDINRLSDYDVDAIVPQSFLKDDSIDNKVLTRSDKNRGKSDNVPSE |
| | | EVVKKMKNYWRQLLNAKLITQRKFDNLTKAERGGLSELDKAGFIKR |
| | | QLVETRQITKHVAQILDSRMNTKYDENDKLIREVKVITLKSKLVSDF |
| | | RKDFQFYKVREINNYHHAHDAYLNAVVGTALIKKYPKLESEFVYGD |
| | | YKVYDVRKMIAKSEQEIGKATAKYFFYSNIMNFFKTEITLANGEIRK |
| | | RPLIETNGETGEIVWDKGRDFATVRKVLSMPQVNIVKKTEVQTGGFS |
| | | KESILPKRNSDKLIARKKDWDPKKYGGFDSPTVAYSVLVVAKVEKG |
| | | KSKKLKSVKELLGITIMERSSFEKNPIDFLEAKGYKEVKKDLIIKLPKY |
| | | SLFELENGRKRMLASAGELQKGNELALPSKYVNFLYLASHYEKLKG |
| | | SPEDNEQKQLFVEQHKHYLDEIIEQISEFSKRVILADANLDKVLSAYN |
| | | KHRDKPIREQAENIIHLFTLTNLGAPAAFKYFDTTIDRKRYTSTKEVL |
| | | DATLIHQSITGLYETRIDLSQLGGDPKKKRKVSGSETPGTSESATPEST |
| | | GGSGPPSSGGGLYRDMGAQGGRPSLIARIPVARILGDPEEESWSPSLT |
| | | NLEKVVVTDVTSNFLTVTIKESNTDQGFFKEKR |
| 989 | DNMT3A/ | MNHDQEFDPPKVYPPVPAEKRKPIRVLSLFDGIATGLLVLKDLGIQV |
| | L- | DRYIASEVCEDSITVGMVRHQGKIMYVGDVRSVTQKHIQEWGPFDL |
| | dSpCas9- | VIGGSPCNDLSIVNPARKGLYEGTGRLFFEFYRLLHDARPKEGDDRPF |
| | XTEN16- | FWLFENVVAMGVSDKRDISRFLESNPVMIDAKEVSAAHRARYFWG |
| | TOX3 | NLPGMNRPLASTVNDKLELQECLEHGRIAKFSKVRTITTRSNSIKQGK |
| | | DQHFPVFMNEKEDILWCTEMERVFGFPVHYTDVSNMSRLARQRLLG |
| | | RSWSVPVIRHLFAPLKEYFACVSSGNSNANSRGPSFSSGLVPLSLRGS |
| | | HMGPMEIYKTVSAWKRQPVRVLSLFRNIDKVLKSLGFLESGSGSGG |
| | | GTLKYVEDVTNVVRRDVEKWGPFDLVYGSTQPLGSSCDRCPGWYM |
| | | FQFHRILQYALPRQESQRPFFWIFMDNLLLTEDDQETTTRFLQTEAVT |
| | | LQDVRGRDYQNAMRVWSNIPGLKSKHAPLTPKEEEYLQAQVRSRSK |
| | | LDAPKVDLLVKNCLLPLREYFKYFSQNSLPLGGPSSGAPPPSGGSPAG |
| | | SPTSTEEGTSESATPESGPGTSTEPSEGSAPGSPAGSPTSTEEGTSTEPS |
| | | EGSAPGTSTEPSEPKKKRKVYMDKKYSIGLAIGTNSVGWAVITDEYK |
| | | VPSKKFKVLGNTDRHSIKKNLIGALLFDSGETAEATRLKRTARRRYT |
| | | RRKNRICYLQEIFSNEMAKVDDSFFHRLEESFLVEEDKKHERHPIFGN |
| | | IVDEVAYHEKYPTIYHLRKKLVDSTDKADLRLIYLALAHMIKFRGHF |
| | | LIEGDLNPDNSDVDKLFIQLVQTYNQLFEENPINASGVDAKAILSARL |
| | | SKSRRLENLIAQLPGEKKNGLFGNLIALSLGLTPNFKSNFDLAEDAKL |
| | | QLSKDTYDDDLDNLLAQIGDQYADLFLAAKNLSDAILLSDILRVNTE |
| | | ITKAPLSASMIKRYDEHHQDLTLLKALVRQQLPEKYKEIFFDQSKNG |
| | | YAGYIDGGASQEEFYKFIKPILEKMDGTEELLVKLNREDLLRKQRTF |
| | | DNGSIPHQIHLGELHAILRRQEDFYPFLKDNREKIEKILTFRIPYYVGP |
| | | LARGNSRFAWMTRKSEETITPWNFEEVVDKGASAQSFIERMTNFDK |
| | | NLPNEKVLPKHSLLYEYFTVYNELTKVKYVTEGMRKPAFLSGEQKK |
| | | AIVDLLFKTNRKVTVKQLKEDYFKKIECFDSVEISGVEDRFNASLGT |
| | | YHDLLKIIKDKDFLDNEENEDILEDIVLTLTLFEDREMIEERLKTYAH |
| | | LFDDKVMKQLKRRRYTGWGRLSRKLINGIRDKQSGKTILDFLKSDG |
| | | FANRNFMQLIHDDSLTFKEDIQKAQVSGQGDSLHEHIANLAGSPAIK |
| | | KGILQTVKVVDELVKVMGRHKPENIVIEMARENQTTQKGQKNSRER |
| | | MKRIEEGIKELGSQILKEHPVENTQLQNEKLYLYYLQNGRDMYVDQ |
| | | ELDINRLSDYDVDAIVPQSFLKDDSIDNKVLTRSDKNRGKSDNVPSE |
| | | EVVKKMKNYWRQLLNAKLITQRKFDNLTKAERGGLSELDKAGFIKR |
| | | QLVETRQITKHVAQILDSRMNTKYDENDKLIREVKVITLKSKLVSDF |
| | | RKDFQFYKVREINNYHHAHDAYLNAVVGTALIKKYPKLESEFVYGD |
| | | YKVYDVRKMIAKSEQEIGKATAKYFFYSNIMNFFKTEITLANGEIRK |
| | | RPLIETNGETGEIVWDKGRDFATVRKVLSMPQVNIVKKTEVQTGGFS |
| | | KESILPKRNSDKLIARKKDWDPKKYGGFDSPTVAYSVLVVAKVEKG |
| | | KSKKLKSVKELLGITIMERSSFEKNPIDFLEAKGYKEVKKDLIIKLPKY |
| | | SLFELENGRKRMLASAGELQKGNELALPSKYVNFLYLASHYEKLKG |
| | | SPEDNEQKQLFVEQHKHYLDEIIEQISEFSKRVILADANLDKVLSAYN |
| | | KHRDKPIREQAENIIHLFTLTNLGAPAAFKYFDTTIDRKRYTSTKEVL |
| | | DATLIHQSITGLYETRIDLSQLGGDPKKKRKVSGSETPGTSESATPEST |
| | | GKDPNEPQKPVSAYALFFRDTQAAIKGQNPNATFGEVSKIVASMWD |
| | | SLGEEQKQVYKRKTEAAKKEYLKALAAYRASLVSK |
| 990 | DNMT3A/ | MNHDQEFDPPKVYPPVPAEKRKPIRVLSLFDGIATGLLVLKDLGIQV |
| | L- | DRYIASEVCEDSITVGMVRHQGKIMYVGDVRSVTQKHIQEWGPFDL |
| | dSpCas9- | VIGGSPCNDLSIVNPARKGLYEGTGRLFFEFYRLLHDARPKEGDDRPF |
| | XTEN16- | FWLFENVVAMGVSDKRDISRFLESNPVMIDAKEVSAAHRARYFWG |
| | TOX4 | NLPGMNRPLASTVNDKLELQECLEHGRIAKFSKVRTITTRSNSIKQGK |
| | | DQHFPVFMNEKEDILWCTEMERVFGFPVHYTDVSNMSRLARQRLLG |
| | | RSWSVPVIRHLFAPLKEYFACVSSGNSNANSRGPSFSSGLVPLSLRGS |
| | | HMGPMEIYKTVSAWKRQPVRVLSLFRNIDKVLKSLGFLESGSGSGG |
| | | GTLKYVEDVTNVVRRDVEKWGPFDLVYGSTQPLGSSCDRCPGWYM |
| | | FQFHRILQYALPRQESQRPFFWIFMDNLLLTEDDQETTTRFLQTEAVT |
| | | LQDVRGRDYQNAMRVWSNIPGLKSKHAPLTPKEEEYLQAQVRSRSK |
| | | LDAPKVDLLVKNCLLPLREYFKYFSQNSLPLGGPSSGAPPPSGGSPAG |
| | | SPTSTEEGTSESATPESGPGTSTEPSEGSAPGSPAGSPTSTEEGTSTEPS |
| | | EGSAPGTSTEPSEPKKKRKVYMDKKYSIGLAIGTNSVGWAVITDEYK |
| | | VPSKKFKVLGNTDRHSIKKNLIGALLFDSGETAEATRLKRTARRRYT |
| | | RRKNRICYLQEIFSNEMAKVDDSFFHRLEESFLVEEDKKHERHPIFGN |
| | | IVDEVAYHEKYPTIYHLRKKLVDSTDKADLRLIYLALAHMIKFRGHF |
| | | LIEGDLNPDNSDVDKLFIQLVQTYNQLFEENPINASGVDAKAILSARL |
| | | SKSRRLENLIAQLPGEKKNGLFGNLIALSLGLTPNFKSNFDLAEDAKL |
| | | QLSKDTYDDDLDNLLAQIGDQYADLFLAAKNLSDAILLSDILRVNTE |
| | | ITKAPLSASMIKRYDEHHQDLTLLKALVRQQLPEKYKEIFFDQSKNG |
| | | YAGYIDGGASQEEFYKFIKPILEKMDGTEELLVKLNREDLLRKQRTF |
| | | DNGSIPHQIHLGELHAILRRQEDFYPFLKDNREKIEKILTFRIPYYVGP |
| | | LARGNSRFAWMTRKSEETITPWNFEEVVDKGASAQSFIERMTNFDK |
| | | NLPNEKVLPKHSLLYEYFTVYNELTKVKYVTEGMRKPAFLSGEQKK |
| | | AIVDLLFKTNRKVTVKQLKEDYFKKIECFDSVEISGVEDRFNASLGT |
| | | YHDLLKIIKDKDFLDNEENEDILEDIVLTLTLFEDREMIEERLKTYAH |
| | | LFDDKVMKQLKRRRYTGWGRLSRKLINGIRDKQSGKTILDFLKSDG |
| | | FANRNFMQLIHDDSLTFKEDIQKAQVSGQGDSLHEHIANLAGSPAIK |
| | | KGILQTVKVVDELVKVMGRHKPENIVIEMARENQTTQKGQKNSRER |
| | | MKRIEEGIKELGSQILKEHPVENTQLQNEKLYLYYLQNGRDMYVDQ |
| | | ELDINRLSDYDVDAIVPQSFLKDDSIDNKVLTRSDKNRGKSDNVPSE |
| | | EVVKKMKNYWRQLLNAKLITQRKFDNLTKAERGGLSELDKAGFIKR |
| | | QLVETRQITKHVAQILDSRMNTKYDENDKLIREVKVITLKSKLVSDF |
| | | RKDFQFYKVREINNYHHAHDAYLNAVVGTALIKKYPKLESEFVYGD |
| | | YKVYDVRKMIAKSEQEIGKATAKYFFYSNIMNFFKTEITLANGEIRK |
| | | RPLIETNGETGEIVWDKGRDFATVRKVLSMPQVNIVKKTEVQTGGFS |
| | | KESILPKRNSDKLIARKKDWDPKKYGGFDSPTVAYSVLVVAKVEKG |
| | | KSKKLKSVKELLGITIMERSSFEKNPIDFLEAKGYKEVKKDLIIKLPKY |
| | | SLFELENGRKRMLASAGELQKGNELALPSKYVNFLYLASHYEKLKG |
| | | SPEDNEQKQLFVEQHKHYLDEIIEQISEFSKRVILADANLDKVLSAYN |
| | | KHRDKPIREQAENIIHLFTLTNLGAPAAFKYFDTTIDRKRYTSTKEVL |
| | | DATLIHQSITGLYETRIDLSQLGGDPKKKRKVSGSETPGTSESATPEST |
| | | GKDPNEPQKPVSAYALFFRDTQAAIKGQNPNATFGEVSKIVASMWD |
| | | SLGEEQKQVYKRKTEAAKKEYLKALAAYKDNQECQ |
| 991 | DNMT3A/ | MNHDQEFDPPKVYPPVPAEKRKPIRVLSLFDGIATGLLVLKDLGIQV |
| | L- | DRYIASEVCEDSITVGMVRHQGKIMYVGDVRSVTQKHIQEWGPFDL |
| | dSpCas9- | VIGGSPCNDLSIVNPARKGLYEGTGRLFFEFYRLLHDARPKEGDDRPF |
| | XTEN16- | FWLFENVVAMGVSDKRDISRFLESNPVMIDAKEVSAAHRARYFWG |
| | I2BP1 | NLPGMNRPLASTVNDKLELQECLEHGRIAKFSKVRTITTRSNSIKQGK |
| | | DQHFPVFMNEKEDILWCTEMERVFGFPVHYTDVSNMSRLARQRLLG |
| | | RSWSVPVIRHLFAPLKEYFACVSSGNSNANSRGPSFSSGLVPLSLRGS |
| | | HMGPMEIYKTVSAWKRQPVRVLSLFRNIDKVLKSLGFLESGSGSGG |
| | | GTLKYVEDVTNVVRRDVEKWGPFDLVYGSTQPLGSSCDRCPGWYM |
| | | FQFHRILQYALPRQESQRPFFWIFMDNLLLTEDDQETTTRFLQTEAVT |
| | | LQDVRGRDYQNAMRVWSNIPGLKSKHAPLTPKEEEYLQAQVRSRSK |
| | | LDAPKVDLLVKNCLLPLREYFKYFSQNSLPLGGPSSGAPPPSGGSPAG |
| | | SPTSTEEGTSESATPESGPGTSTEPSEGSAPGSPAGSPTSTEEGTSTEPS |
| | | EGSAPGTSTEPSEPKKKRKVYMDKKYSIGLAIGTNSVGWAVITDEYK |
| | | VPSKKFKVLGNTDRHSIKKNLIGALLFDSGETAEATRLKRTARRRYT |
| | | RRKNRICYLQEIFSNEMAKVDDSFFHRLEESFLVEEDKKHERHPIFGN |
| | | IVDEVAYHEKYPTIYHLRKKLVDSTDKADLRLIYLALAHMIKFRGHF |
| | | LIEGDLNPDNSDVDKLFIQLVQTYNQLFEENPINASGVDAKAILSARL |
| | | SKSRRLENLIAQLPGEKKNGLFGNLIALSLGLTPNFKSNFDLAEDAKL |
| | | QLSKDTYDDDLDNLLAQIGDQYADLFLAAKNLSDAILLSDILRVNTE |
| | | ITKAPLSASMIKRYDEHHQDLTLLKALVRQQLPEKYKEIFFDQSKNG |
| | | YAGYIDGGASQEEFYKFIKPILEKMDGTEELLVKLNREDLLRKQRTF |
| | | DNGSIPHQIHLGELHAILRRQEDFYPFLKDNREKIEKILTFRIPYYVGP |
| | | LARGNSRFAWMTRKSEETITPWNFEEVVDKGASAQSFIERMTNFDK |
| | | NLPNEKVLPKHSLLYEYFTVYNELTKVKYVTEGMRKPAFLSGEQKK |
| | | AIVDLLFKTNRKVTVKQLKEDYFKKIECFDSVEISGVEDRFNASLGT |
| | | YHDLLKIIKDKDFLDNEENEDILEDIVLTLTLFEDREMIEERLKTYAH |
| | | LFDDKVMKQLKRRRYTGWGRLSRKLINGIRDKQSGKTILDFLKSDG |
| | | FANRNFMQLIHDDSLTFKEDIQKAQVSGQGDSLHEHIANLAGSPAIK |
| | | KGILQTVKVVDELVKVMGRHKPENIVIEMARENQTTQKGQKNSRER |
| | | MKRIEEGIKELGSQILKEHPVENTQLQNEKLYLYYLQNGRDMYVDQ |
| | | ELDINRLSDYDVDAIVPQSFLKDDSIDNKVLTRSDKNRGKSDNVPSE |
| | | EVVKKMKNYWRQLLNAKLITQRKFDNLTKAERGGLSELDKAGFIKR |
| | | QLVETRQITKHVAQILDSRMNTKYDENDKLIREVKVITLKSKLVSDF |
| | | RKDFQFYKVREINNYHHAHDAYLNAVVGTALIKKYPKLESEFVYGD |
| | | YKVYDVRKMIAKSEQEIGKATAKYFFYSNIMNFFKTEITLANGEIRK |
| | | RPLIETNGETGEIVWDKGRDFATVRKVLSMPQVNIVKKTEVQTGGFS |
| | | KESILPKRNSDKLIARKKDWDPKKYGGFDSPTVAYSVLVVAKVEKG |
| | | KSKKLKSVKELLGITIMERSSFEKNPIDFLEAKGYKEVKKDLIIKLPKY |
| | | SLFELENGRKRMLASAGELQKGNELALPSKYVNFLYLASHYEKLKG |
| | | SPEDNEQKQLFVEQHKHYLDEIIEQISEFSKRVILADANLDKVLSAYN |
| | | KHRDKPIREQAENIIHLFTLTNLGAPAAFKYFDTTIDRKRYTSTKEVL |
| | | DATLIHQSITGLYETRIDLSQLGGDPKKKRKVSGSETPGTSESATPEST |
| | | GASVQASRRQWCYLCDLPKMPWAMVWDFSEAVCRGCVNFEGADR |
| | | IELLIDAARQLKRSHVLPEGRSPGPPALKHPATKDLA |
| | | MNHDQEFDPPKVYPPVPAEKRKPIRVLSLFDGIATGLLVLKDLGIQV |
| | | DRYIASEVCEDSITVGMVRHQGKIMYVGDVRSVTQKHIQEWGPFDL |
| | | VIGGSPCNDLSIVNPARKGLYEGTGRLFFEFYRLLHDARPKEGDDRPF |
| | | FWLFENVVAMGVSDKRDISRFLESNPVMIDAKEVSAAHRARYFWG |
| 992 | DNMT3A/ | NLPGMNRPLASTVNDKLELQECLEHGRIAKFSKVRTITTRSNSIKQGK |
| | L- | DQHFPVFMNEKEDILWCTEMERVFGFPVHYTDVSNMSRLARQRLLG |
| | dSpCas9- | RSWSVPVIRHLFAPLKEYFACVSSGNSNANSRGPSFSSGLVPLSLRGS |
| | XTEN16- | HMGPMEIYKTVSAWKRQPVRVLSLFRNIDKVLKSLGFLESGSGSGG |
| | MBD2 | GTLKYVEDVTNVVRRDVEKWGPFDLVYGSTQPLGSSCDRCPGWYM |
| | | FQFHRILQYALPRQESQRPFFWIFMDNLLLTEDDQETTTRFLQTEAVT |
| | | LQDVRGRDYQNAMRVWSNIPGLKSKHAPLTPKEEEYLQAQVRSRSK |
| | | LDAPKVDLLVKNCLLPLREYFKYFSQNSLPLGGPSSGAPPPSGGSPAG |
| | | SPTSTEEGTSESATPESGPGTSTEPSEGSAPGSPAGSPTSTEEGTSTEPS |
| | | EGSAPGTSTEPSEPKKKRKVYMDKKYSIGLAIGTNSVGWAVITDEYK |
| | | VPSKKFKVLGNTDRHSIKKNLIGALLFDSGETAEATRLKRTARRRYT |
| | | RRKNRICYLQEIFSNEMAKVDDSFFHRLEESFLVEEDKKHERHPIFGN |
| | | IVDEVAYHEKYPTIYHLRKKLVDSTDKADLRLIYLALAHMIKFRGHF |
| | | LIEGDLNPDNSDVDKLFIQLVQTYNQLFEENPINASGVDAKAILSARL |
| | | SKSRRLENLIAQLPGEKKNGLFGNLIALSLGLTPNFKSNFDLAEDAKL |
| | | QLSKDTYDDDLDNLLAQIGDQYADLFLAAKNLSDAILLSDILRVNTE |
| | | ITKAPLSASMIKRYDEHHQDLTLLKALVRQQLPEKYKEIFFDQSKNG |
| | | YAGYIDGGASQEEFYKFIKPILEKMDGTEELLVKLNREDLLRKQRTF |
| | | DNGSIPHQIHLGELHAILRRQEDFYPFLKDNREKIEKILTFRIPYYVGP |
| | | LARGNSRFAWMTRKSEETITPWNFEEVVDKGASAQSFIERMTNFDK |
| | | NLPNEKVLPKHSLLYEYFTVYNELTKVKYVTEGMRKPAFLSGEQKK |
| | | AIVDLLFKTNRKVTVKQLKEDYFKKIECFDSVEISGVEDRFNASLGT |
| | | YHDLLKIIKDKDFLDNEENEDILEDIVLTLTLFEDREMIEERLKTYAH |
| | | LFDDKVMKQLKRRRYTGWGRLSRKLINGIRDKQSGKTILDFLKSDG |
| | | FANRNFMQLIHDDSLTFKEDIQKAQVSGQGDSLHEHIANLAGSPAIK |
| | | KGILQTVKVVDELVKVMGRHKPENIVIEMARENQTTQKGQKNSRER |
| | | MKRIEEGIKELGSQILKEHPVENTQLQNEKLYLYYLQNGRDMYVDQ |
| | | ELDINRLSDYDVDAIVPQSFLKDDSIDNKVLTRSDKNRGKSDNVPSE |
| | | EVVKKMKNYWRQLLNAKLITQRKFDNLTKAERGGLSELDKAGFIKR |
| | | QLVETRQITKHVAQILDSRMNTKYDENDKLIREVKVITLKSKLVSDF |
| | | RKDFQFYKVREINNYHHAHDAYLNAVVGTALIKKYPKLESEFVYGD |
| | | YKVYDVRKMIAKSEQEIGKATAKYFFYSNIMNFFKTEITLANGEIRK |
| | | RPLIETNGETGEIVWDKGRDFATVRKVLSMPQVNIVKKTEVQTGGFS |
| | | KESILPKRNSDKLIARKKDWDPKKYGGFDSPTVAYSVLVVAKVEKG |
| | | KSKKLKSVKELLGITIMERSSFEKNPIDFLEAKGYKEVKKDLIIKLPKY |
| | | SLFELENGRKRMLASAGELQKGNELALPSKYVNFLYLASHYEKLKG |
| | | SPEDNEQKQLFVEQHKHYLDEIIEQISEFSKRVILADANLDKVLSAYN |
| | | KHRDKPIREQAENIIHLFTLTNLGAPAAFKYFDTTIDRKRYTSTKEVL |
| | | DATLIHQSITGLYETRIDLSQLGGDPKKKRKVSGSETPGTSESATPEST |
| | | GMRAHPGGGRCCPEQEEGESAAGGSGAGGDSAIEQGGQGSALAPSP |
| | | VSGVRREGARGGGRGRGRWKQAGRGGGVCGRGRGRGRGRGRGRG |
| | | RGRGRGRPPSGGSGLGGDGGGCGGGGSGGGGAPRREPVPFPSGSAG |
| | | PGPRGPRATESGKRMDCPALPPGWKKEEVIRKSGLSAGKSDVYYFSP |
| | | SGKKFRSKPQLARYLGNTVDLSSFDFRTGKMMPSKLQKNKQRLRND |
| | | PLNQNKGKPDLNTTLPIRQTASIFKQPVTKVTNHPSNKVKSDPQRMN |
| | | EQPRQLFWEKRLQGLSASDVTEQIIKTMELPKGLQGVGPGSNDETLL |
| | | SAVASALHTSSAPITGQVSAAVEKNPAVWLNTSQPLCKAFIVTDEDI |
| | | RKQEERVQQVRKKLEEALMADILSRAADTEEMDIEMDSGDEA |
| 993 | DNMT3A/ | MNHDQEFDPPKVYPPVPAEKRKPIRVLSLFDGIATGLLVLKDLGIQV |
| | L- | DRYIASEVCEDSITVGMVRHQGKIMYVGDVRSVTQKHIQEWGPFDL |
| | dSpCas9- | VIGGSPCNDLSIVNPARKGLYEGTGRLFFEFYRLLHDARPKEGDDRPF |
| | XTEN16- | FWLFENVVAMGVSDKRDISRFLESNPVMIDAKEVSAAHRARYFWG |
| | SetDB1 | NLPGMNRPLASTVNDKLELQECLEHGRIAKFSKVRTITTRSNSIKQGK |
| | | DQHFPVFMNEKEDILWCTEMERVFGFPVHYTDVSNMSRLARQRLLG |
| | | RSWSVPVIRHLFAPLKEYFACVSSGNSNANSRGPSFSSGLVPLSLRGS |
| | | HMGPMEIYKTVSAWKRQPVRVLSLFRNIDKVLKSLGFLESGSGSGG |
| | | GTLKYVEDVTNVVRRDVEKWGPFDLVYGSTQPLGSSCDRCPGWYM |
| | | FQFHRILQYALPRQESQRPFFWIFMDNLLLTEDDQETTTRFLQTEAVT |
| | | LQDVRGRDYQNAMRVWSNIPGLKSKHAPLTPKEEEYLQAQVRSRSK |
| | | LDAPKVDLLVKNCLLPLREYFKYFSQNSLPLGGPSSGAPPPSGGSPAG |
| | | SPTSTEEGTSESATPESGPGTSTEPSEGSAPGSPAGSPTSTEEGTSTEPS |
| | | EGSAPGTSTEPSEPKKKRKVYMDKKYSIGLAIGTNSVGWAVITDEYK |
| | | VPSKKFKVLGNTDRHSIKKNLIGALLFDSGETAEATRLKRTARRRYT |
| | | RRKNRICYLQEIFSNEMAKVDDSFFHRLEESFLVEEDKKHERHPIFGN |
| | | IVDEVAYHEKYPTIYHLRKKLVDSTDKADLRLIYLALAHMIKFRGHF |
| | | LIEGDLNPDNSDVDKLFIQLVQTYNQLFEENPINASGVDAKAILSARL |
| | | SKSRRLENLIAQLPGEKKNGLFGNLIALSLGLTPNFKSNFDLAEDAKL |
| | | QLSKDTYDDDLDNLLAQIGDQYADLFLAAKNLSDAILLSDILRVNTE |
| | | ITKAPLSASMIKRYDEHHQDLTLLKALVRQQLPEKYKEIFFDQSKNG |
| | | YAGYIDGGASQEEFYKFIKPILEKMDGTEELLVKLNREDLLRKQRTF |
| | | DNGSIPHQIHLGELHAILRRQEDFYPFLKDNREKIEKILTFRIPYYVGP |
| | | LARGNSRFAWMTRKSEETITPWNFEEVVDKGASAQSFIERMTNFDK |
| | | NLPNEKVLPKHSLLYEYFTVYNELTKVKYVTEGMRKPAFLSGEQKK |
| | | AIVDLLFKTNRKVTVKQLKEDYFKKIECFDSVEISGVEDRFNASLGT |
| | | YHDLLKIIKDKDFLDNEENEDILEDIVLTLTLFEDREMIEERLKTYAH |
| | | LFDDKVMKQLKRRRYTGWGRLSRKLINGIRDKQSGKTILDFLKSDG |
| | | FANRNFMQLIHDDSLTFKEDIQKAQVSGQGDSLHEHIANLAGSPAIK |
| | | KGILQTVKVVDELVKVMGRHKPENIVIEMARENQTTQKGQKNSRER |
| | | MKRIEEGIKELGSQILKEHPVENTQLQNEKLYLYYLQNGRDMYVDQ |
| | | ELDINRLSDYDVDAIVPQSFLKDDSIDNKVLTRSDKNRGKSDNVPSE |
| | | EVVKKMKNYWRQLLNAKLITQRKFDNLTKAERGGLSELDKAGFIKR |
| | | QLVETRQITKHVAQILDSRMNTKYDENDKLIREVKVITLKSKLVSDF |
| | | RKDFQFYKVREINNYHHAHDAYLNAVVGTALIKKYPKLESEFVYGD |
| | | YKVYDVRKMIAKSEQEIGKATAKYFFYSNIMNFFKTEITLANGEIRK |
| | | RPLIETNGETGEIVWDKGRDFATVRKVLSMPQVNIVKKTEVQTGGFS |
| | | KESILPKRNSDKLIARKKDWDPKKYGGFDSPTVAYSVLVVAKVEKG |
| | | KSKKLKSVKELLGITIMERSSFEKNPIDFLEAKGYKEVKKDLIIKLPKY |
| | | SLFELENGRKRMLASAGELQKGNELALPSKYVNFLYLASHYEKLKG |
| | | SPEDNEQKQLFVEQHKHYLDEIIEQISEFSKRVILADANLDKVLSAYN |
| | | KHRDKPIREQAENIIHLFTLTNLGAPAAFKYFDTTIDRKRYTSTKEVL |
| | | DATLIHQSITGLYETRIDLSQLGGDPKKKRKVSGSETPGTSESATPEST |
| | | GMSSLPGCIGLDAATATVESEEIAELQQAVVEELGISMEELRHFIDEE |
| | | LEKMDCVQQRKKQLAELETWVIQKESEVAHVDQLFDDASRAVINC |
| | | ESLVKDFYSKLGLQYRDSSSEDESSRPTEIIEIPDEDDDVLSIDSGDAG |
| | | SRTPKDQKLREAMAALRKSAQDVQKFMDAVNKKSSSQDLHKGTLS |
| | | QMSGELSKDGDLIVSMRILGKKRTKTWHKGTLIAIQTVGPGKKYKV |
| | | KFDNKGKSLLSGNHIAYDYHPPADKLYVGSRVVAKYKDGNQVWLY |
| | | AGIVAETPNVKNKLRFLIFFDDGYASYVTQSELYPICRPLKKTWEDIE |
| | | DISCRDFIEEYVTAYPNRPMVLLKSGQLIKTEWEGTWWKSRVEEVD |
| | | GSLVRILFLDDKRCEWIYRGSTRLEPMFSMKTSSASALEKKQGQLRT |
| | | RPNMGAVRSKGPVVQYTQDLTGTGTQFKPVEPPQPTAPPAPPFPPAP |
| | | PLSPQAGDSDLESQLAQSRKQVAKKSTSFRPGSVGSGHSSPTSPALSE |
| | | NVSGGKPGINQTYRSPLGSTASAPAPSALPAPPAPPVFHGMLERAPAE |
| | | PSYRAPMEKLFYLPHVCSYTCLSRVRPMRNEQYRGKNPLLVPLLYD |
| | | FRRMTARRRVNRKMGFHVIYKTPCGLCLRTMQEIERYLFETGCDFLF |
| | | LEMFCLDPYVLVDRKFQPYKPFYYILDITYGKEDVPLSCVNEIDTTPP |
| | | PQVAYSKERIPGKGVFINTGPEFLVGCDCKDGCRDKSKCACHQLTIQ |
| | | ATACTPGGQINPNSGYQYKRLEECLPTGVYECNKRCKCDPNMCTNR |
| | | LVQHGLQVRLQLFKTQNKGWGIRCLDDIAKGSFVCIYAGKILTDDFA |
| | | DKEGLEMGDEYFANLDHIESVENFKEGYESDAPCSSDSSGVDLKDQ |
| | | EDGNSGTEDPEESNDDSSDDNFCKDEDFSTSSVWRSYATRRQTRGQ |
| | | KENGLSETTSKDSHPPDLGPPHIPVPPSIPVGGCNPPSSEETPKNKVAS |
| | | WLSCNSVSEGGFADSDSHSSFKTNEGGEGRAGGSRMEAEKASTSGL |
| | | GIKDEGDIKQAKKEDTDDRNKMSVVTESSRNYGYNPSPVKPEGLRR |
| | | PPSKTSMHQSRRLMASAQSNPDDVLTLSSSTESEGESGTSRKPTAGQ |
| | | TSATAVDSDDIQTISSGSEGDDFEDKKNMTGPMKRQVAVKSTRGFA |
| | | LKSTHGIAIKSTNMASVDKGESAPVRKNTRQFYDGEESCYIIDAKLE |
| | | GNLGRYLNHSCSPNLFVQNVFVDTHDLRFPWVAFFASKRIRAGTELT |
| | | WDYNYEVGSVEGKELLCCCGAIECRGRLL |
| 994 | DNMT3A/ | MNHDQEFDPPKVYPPVPAEKRKPIRVLSLFDGIATGLLVLKDLGIQV |
| | L- | DRYIASEVCEDSITVGMVRHQGKIMYVGDVRSVTQKHIQEWGPFDL |
| | dSpCas9- | VIGGSPCNDLSIVNPARKGLYEGTGRLFFEFYRLLHDARPKEGDDRPF |
| | XTEN16- | FWLFENVVAMGVSDKRDISRFLESNPVMIDAKEVSAAHRARYFWG |
| | MeCP2 | NLPGMNRPLASTVNDKLELQECLEHGRIAKFSKVRTITTRSNSIKQGK |
| | | DQHFPVFMNEKEDILWCTEMERVFGFPVHYTDVSNMSRLARQRLLG |
| | | RSWSVPVIRHLFAPLKEYFACVSSGNSNANSRGPSFSSGLVPLSLRGS |
| | | HMGPMEIYKTVSAWKRQPVRVLSLFRNIDKVLKSLGFLESGSGSGG |
| | | GTLKYVEDVTNVVRRDVEKWGPFDLVYGSTQPLGSSCDRCPGWYM |
| | | FQFHRILQYALPRQESQRPFFWIFMDNLLLTEDDQETTTRFLQTEAVT |
| | | LQDVRGRDYQNAMRVWSNIPGLKSKHAPLTPKEEEYLQAQVRSRSK |
| | | LDAPKVDLLVKNCLLPLREYFKYFSQNSLPLGGPSSGAPPPSGGSPAG |
| | | SPTSTEEGTSESATPESGPGTSTEPSEGSAPGSPAGSPTSTEEGTSTEPS |
| | | EGSAPGTSTEPSEPKKKRKVYMDKKYSIGLAIGTNSVGWAVITDEYK |
| | | VPSKKFKVLGNTDRHSIKKNLIGALLFDSGETAEATRLKRTARRRYT |
| | | RRKNRICYLQEIFSNEMAKVDDSFFHRLEESFLVEEDKKHERHPIFGN |
| | | IVDEVAYHEKYPTIYHLRKKLVDSTDKADLRLIYLALAHMIKFRGHF |
| | | LIEGDLNPDNSDVDKLFIQLVQTYNQLFEENPINASGVDAKAILSARL |
| | | SKSRRLENLIAQLPGEKKNGLFGNLIALSLGLTPNFKSNFDLAEDAKL |
| | | QLSKDTYDDDLDNLLAQIGDQYADLFLAAKNLSDAILLSDILRVNTE |
| | | ITKAPLSASMIKRYDEHHQDLTLLKALVRQQLPEKYKEIFFDQSKNG |
| | | YAGYIDGGASQEEFYKFIKPILEKMDGTEELLVKLNREDLLRKQRTF |
| | | DNGSIPHQIHLGELHAILRRQEDFYPFLKDNREKIEKILTFRIPYYVGP |
| | | LARGNSRFAWMTRKSEETITPWNFEEVVDKGASAQSFIERMTNFDK |
| | | NLPNEKVLPKHSLLYEYFTVYNELTKVKYVTEGMRKPAFLSGEQKK |
| | | AIVDLLFKTNRKVTVKQLKEDYFKKIECFDSVEISGVEDRFNASLGT |
| | | YHDLLKIIKDKDFLDNEENEDILEDIVLTLTLFEDREMIEERLKTYAH |
| | | LFDDKVMKQLKRRRYTGWGRLSRKLINGIRDKQSGKTILDFLKSDG |
| | | FANRNFMQLIHDDSLTFKEDIQKAQVSGQGDSLHEHIANLAGSPAIK |
| | | KGILQTVKVVDELVKVMGRHKPENIVIEMARENQTTQKGQKNSRER |
| | | MKRIEEGIKELGSQILKEHPVENTQLQNEKLYLYYLQNGRDMYVDQ |
| | | ELDINRLSDYDVDAIVPQSFLKDDSIDNKVLTRSDKNRGKSDNVPSE |
| | | EVVKKMKNYWRQLLNAKLITQRKFDNLTKAERGGLSELDKAGFIKR |
| | | QLVETRQITKHVAQILDSRMNTKYDENDKLIREVKVITLKSKLVSDF |
| | | RKDFQFYKVREINNYHHAHDAYLNAVVGTALIKKYPKLESEFVYGD |
| | | YKVYDVRKMIAKSEQEIGKATAKYFFYSNIMNFFKTEITLANGEIRK |
| | | RPLIETNGETGEIVWDKGRDFATVRKVLSMPQVNIVKKTEVQTGGFS |
| | | KESILPKRNSDKLIARKKDWDPKKYGGFDSPTVAYSVLVVAKVEKG |
| | | KSKKLKSVKELLGITIMERSSFEKNPIDFLEAKGYKEVKKDLIIKLPKY |
| | | SLFELENGRKRMLASAGELQKGNELALPSKYVNFLYLASHYEKLKG |
| | | SPEDNEQKQLFVEQHKHYLDEIIEQISEFSKRVILADANLDKVLSAYN |
| | | KHRDKPIREQAENIIHLFTLTNLGAPAAFKYFDTTIDRKRYTSTKEVL |
| | | DATLIHQSITGLYETRIDLSQLGGDPKKKRKVSGSETPGTSESATPEST |
| | | GMVAGMLGLREEKSEDQDLQGLKDKPLKFKKVKKDKKEEKEGKH |
| | | EPVQPSAHHSAEPAEAGKAETSEGSGSAPAVPEASASPKQRRSIIRDR |
| | | GPMYDDPTLPEGWTRKLKQRKSGRSAGKYDVYLINPQGKAFRSKVE |
| | | LIAYFEKVGDTSLDPNDFDFTVTGRGSPSRREQKPPKKPKSPKAPGTG |
| | | RGRGRPKGSGTTRPKAATSEGVQVKRVLEKSPGKLLVKMPFQTSPG |
| | | GKAEGGGATTSTQVMVIKRPGRKRKAEADPQAIPKKRGRKPGSVVA |
| | | AAAAEAKKKAVKESSIRSVQETVLPIKKRKTRETVSIEVKEVVKPLL |
| | | VSTLGEKSGKGLKTCKSPGRKSKESSPKGRSSSASSPPKKEHHHHHH |
| | | HSESPKAPVPLLPPLPPPPPEPESSEDPTSPPEPQDLSSSVCKEEKMPRG |
| | | GSLESDGCPKEPAKTQPAVATAATAAEKYKHRGEGERKDIVSSSMP |
| | | RPNREEPVDSRTPVTERVS |
| 995 | DNMT3A/ | MNHDQEFDPPKVYPPVPAEKRKPIRVLSLFDGIATGLLVLKDLGIQV |
| | L- | DRYIASEVCEDSITVGMVRHQGKIMYVGDVRSVTQKHIQEWGPFDL |
| | dSpCas9- | VIGGSPCNDLSIVNPARKGLYEGTGRLFFEFYRLLHDARPKEGDDRPF |
| | XTEN16- | FWLFENVVAMGVSDKRDISRFLESNPVMIDAKEVSAAHRARYFWG |
| | Kap1 | NLPGMNRPLASTVNDKLELQECLEHGRIAKFSKVRTITTRSNSIKQGK |
| | | DQHFPVFMNEKEDILWCTEMERVFGFPVHYTDVSNMSRLARQRLLG |
| | | RSWSVPVIRHLFAPLKEYFACVSSGNSNANSRGPSFSSGLVPLSLRGS |
| | | HMGPMEIYKTVSAWKRQPVRVLSLFRNIDKVLKSLGFLESGSGSGG |
| | | GTLKYVEDVTNVVRRDVEKWGPFDLVYGSTQPLGSSCDRCPGWYM |
| | | FQFHRILQYALPRQESQRPFFWIFMDNLLLTEDDQETTTRFLQTEAVT |
| | | LQDVRGRDYQNAMRVWSNIPGLKSKHAPLTPKEEEYLQAQVRSRSK |
| | | LDAPKVDLLVKNCLLPLREYFKYFSQNSLPLGGPSSGAPPPSGGSPAG |
| | | SPTSTEEGTSESATPESGPGTSTEPSEGSAPGSPAGSPTSTEEGTSTEPS |
| | | EGSAPGTSTEPSEPKKKRKVYMDKKYSIGLAIGTNSVGWAVITDEYK |
| | | VPSKKFKVLGNTDRHSIKKNLIGALLFDSGETAEATRLKRTARRRYT |
| | | RRKNRICYLQEIFSNEMAKVDDSFFHRLEESFLVEEDKKHERHPIFGN |
| | | IVDEVAYHEKYPTIYHLRKKLVDSTDKADLRLIYLALAHMIKFRGHF |
| | | LIEGDLNPDNSDVDKLFIQLVQTYNQLFEENPINASGVDAKAILSARL |
| | | SKSRRLENLIAQLPGEKKNGLFGNLIALSLGLTPNFKSNFDLAEDAKL |
| | | QLSKDTYDDDLDNLLAQIGDQYADLFLAAKNLSDAILLSDILRVNTE |
| | | ITKAPLSASMIKRYDEHHQDLTLLKALVRQQLPEKYKEIFFDQSKNG |
| | | YAGYIDGGASQEEFYKFIKPILEKMDGTEELLVKLNREDLLRKQRTF |
| | | DNGSIPHQIHLGELHAILRRQEDFYPFLKDNREKIEKILTFRIPYYVGP |
| | | LARGNSRFAWMTRKSEETITPWNFEEVVDKGASAQSFIERMTNFDK |
| | | NLPNEKVLPKHSLLYEYFTVYNELTKVKYVTEGMRKPAFLSGEQKK |
| | | AIVDLLFKTNRKVTVKQLKEDYFKKIECFDSVEISGVEDRFNASLGT |
| | | YHDLLKIIKDKDFLDNEENEDILEDIVLTLTLFEDREMIEERLKTYAH |
| | | LFDDKVMKQLKRRRYTGWGRLSRKLINGIRDKQSGKTILDFLKSDG |
| | | FANRNFMQLIHDDSLTFKEDIQKAQVSGQGDSLHEHIANLAGSPAIK |
| | | KGILQTVKVVDELVKVMGRHKPENIVIEMARENQTTQKGQKNSRER |
| | | MKRIEEGIKELGSQILKEHPVENTQLQNEKLYLYYLQNGRDMYVDQ |
| | | ELDINRLSDYDVDAIVPQSFLKDDSIDNKVLTRSDKNRGKSDNVPSE |
| | | EVVKKMKNYWRQLLNAKLITQRKFDNLTKAERGGLSELDKAGFIKR |
| | | QLVETRQITKHVAQILDSRMNTKYDENDKLIREVKVITLKSKLVSDF |
| | | RKDFQFYKVREINNYHHAHDAYLNAVVGTALIKKYPKLESEFVYGD |
| | | YKVYDVRKMIAKSEQEIGKATAKYFFYSNIMNFFKTEITLANGEIRK |
| | | RPLIETNGETGEIVWDKGRDFATVRKVLSMPQVNIVKKTEVQTGGFS |
| | | KESILPKRNSDKLIARKKDWDPKKYGGFDSPTVAYSVLVVAKVEKG |
| | | KSKKLKSVKELLGITIMERSSFEKNPIDFLEAKGYKEVKKDLIIKLPKY |
| | | SLFELENGRKRMLASAGELQKGNELALPSKYVNFLYLASHYEKLKG |
| | | SPEDNEQKQLFVEQHKHYLDEIIEQISEFSKRVILADANLDKVLSAYN |
| | | KHRDKPIREQAENIIHLFTLTNLGAPAAFKYFDTTIDRKRYTSTKEVL |
| | | DATLIHQSITGLYETRIDLSQLGGDPKKKRKVSGSETPGTSESATPEST |
| | | GMAASAAAASAAAASAASGSPGPGEGSAGGEKRSTAPSAAASASAS |
| | | AAASSPAGGGAEALELLEHCGVCRERLRPEREPRLLPCLHSACSACL |
| | | GPAAPAAANSSGDGGAAGDGTVVDCPVCKQQCFSKDIVENYFMRD |
| | | SGSKAATDAQDANQCCTSCEDNAPATSYCVECSEPLCETCVEAHQR |
| | | VKYTKDHTVRSTGPAKSRDGERTVYCNVHKHEPLVLFCESCDTLTC |
| | | RDCQLNAHKDHQYQFLEDAVRNQRKLLASLVKRLGDKHATLQKST |
| | | KEVRSSIRQVSDVQKRVQVDVKMAILQIMKELNKRGRVLVNDAQK |
| | | VTEGQQERLERQHWTMTKIQKHQEHILRFASWALESDNNTALLLSK |
| | | KLIYFQLHRALKMIVDPVEPHGEMKFQWDLNAWTKSAEAFGKIVAE |
| | | RPGTNSTGPAPMAPPRAPGPLSKQGSGSSQPMEVQEGYGFGSGDDP |
| | | YSSAEPHVSGVKRSRSGEGEVSGLMRKVPRVSLERLDLDLTADSQPP |
| | | VFKVFPGSTTEDYNLIVIERGAAAAATGQPGTAPAGTPGAPPLAGMA |
| | | IVKEEETEAAIGAPPTATEGPETKPVLMALAEGPGAEGPRLASPSGST |
| | | SSGLEVVAPEGTSAPGGGPGTLDDSATICRVCQKPGDLVMCNQCEFC |
| | | FHLDCHLPALQDVPGEEWSCSLCHVLPDLKEEDGSLSLDGADSTGV |
| | | VAKLSPANQRKCERVLLALFCHEPCRPLHQLATDSTFSLDQPGGTLD |
| | | LTLIRARLQEKLSPPYSSPQEFAQDVGRMFKQFNKLTEDKADVQSIIG |
| | | LQRFFETRMNEAFGDTKFSAVLVEPPPMSLPGAGLSSQELSGGPGDG |
| | | P |
| 996 | DNMT3A/ | MNHDQEFDPPKVYPPVPAEKRKPIRVLSLFDGIATGLLVLKDLGIQV |
| | L- | DRYIASEVCEDSITVGMVRHQGKIMYVGDVRSVTQKHIQEWGPFDL |
| | dSpCas9- | VIGGSPCNDLSIVNPARKGLYEGTGRLFFEFYRLLHDARPKEGDDRPF |
| | XTEN16- | FWLFENVVAMGVSDKRDISRFLESNPVMIDAKEVSAAHRARYFWG |
| | HP1a | NLPGMNRPLASTVNDKLELQECLEHGRIAKFSKVRTITTRSNSIKQGK |
| | | DQHFPVFMNEKEDILWCTEMERVFGFPVHYTDVSNMSRLARQRLLG |
| | | RSWSVPVIRHLFAPLKEYFACVSSGNSNANSRGPSFSSGLVPLSLRGS |
| | | HMGPMEIYKTVSAWKRQPVRVLSLFRNIDKVLKSLGFLESGSGSGG |
| | | GTLKYVEDVTNVVRRDVEKWGPFDLVYGSTQPLGSSCDRCPGWYM |
| | | FQFHRILQYALPRQESQRPFFWIFMDNLLLTEDDQETTTRFLQTEAVT |
| | | LQDVRGRDYQNAMRVWSNIPGLKSKHAPLTPKEEEYLQAQVRSRSK |
| | | LDAPKVDLLVKNCLLPLREYFKYFSQNSLPLGGPSSGAPPPSGGSPAG |
| | | SPTSTEEGTSESATPESGPGTSTEPSEGSAPGSPAGSPTSTEEGTSTEPS |
| | | EGSAPGTSTEPSEPKKKRKVYMDKKYSIGLAIGTNSVGWAVITDEYK |
| | | VPSKKFKVLGNTDRHSIKKNLIGALLFDSGETAEATRLKRTARRRYT |
| | | RRKNRICYLQEIFSNEMAKVDDSFFHRLEESFLVEEDKKHERHPIFGN |
| | | IVDEVAYHEKYPTIYHLRKKLVDSTDKADLRLIYLALAHMIKFRGHF |
| | | LIEGDLNPDNSDVDKLFIQLVQTYNQLFEENPINASGVDAKAILSARL |
| | | SKSRRLENLIAQLPGEKKNGLFGNLIALSLGLTPNFKSNFDLAEDAKL |
| | | QLSKDTYDDDLDNLLAQIGDQYADLFLAAKNLSDAILLSDILRVNTE |
| | | ITKAPLSASMIKRYDEHHQDLTLLKALVRQQLPEKYKEIFFDQSKNG |
| | | YAGYIDGGASQEEFYKFIKPILEKMDGTEELLVKLNREDLLRKQRTF |
| | | DNGSIPHQIHLGELHAILRRQEDFYPFLKDNREKIEKILTFRIPYYVGP |
| | | LARGNSRFAWMTRKSEETITPWNFEEVVDKGASAQSFIERMTNFDK |
| | | NLPNEKVLPKHSLLYEYFTVYNELTKVKYVTEGMRKPAFLSGEQKK |
| | | AIVDLLFKTNRKVTVKQLKEDYFKKIECFDSVEISGVEDRFNASLGT |
| | | YHDLLKIIKDKDFLDNEENEDILEDIVLTLTLFEDREMIEERLKTYAH |
| | | LFDDKVMKQLKRRRYTGWGRLSRKLINGIRDKQSGKTILDFLKSDG |
| | | FANRNFMQLIHDDSLTFKEDIQKAQVSGQGDSLHEHIANLAGSPAIK |
| | | KGILQTVKVVDELVKVMGRHKPENIVIEMARENQTTQKGQKNSRER |
| | | MKRIEEGIKELGSQILKEHPVENTQLQNEKLYLYYLQNGRDMYVDQ |
| | | ELDINRLSDYDVDAIVPQSFLKDDSIDNKVLTRSDKNRGKSDNVPSE |
| | | EVVKKMKNYWRQLLNAKLITQRKFDNLTKAERGGLSELDKAGFIKR |
| | | QLVETRQITKHVAQILDSRMNTKYDENDKLIREVKVITLKSKLVSDF |
| | | RKDFQFYKVREINNYHHAHDAYLNAVVGTALIKKYPKLESEFVYGD |
| | | YKVYDVRKMIAKSEQEIGKATAKYFFYSNIMNFFKTEITLANGEIRK |
| | | RPLIETNGETGEIVWDKGRDFATVRKVLSMPQVNIVKKTEVQTGGFS |
| | | KESILPKRNSDKLIARKKDWDPKKYGGFDSPTVAYSVLVVAKVEKG |
| | | KSKKLKSVKELLGITIMERSSFEKNPIDFLEAKGYKEVKKDLIIKLPKY |
| | | SLFELENGRKRMLASAGELQKGNELALPSKYVNFLYLASHYEKLKG |
| | | SPEDNEQKQLFVEQHKHYLDEIIEQISEFSKRVILADANLDKVLSAYN |
| | | KHRDKPIREQAENIIHLFTLTNLGAPAAFKYFDTTIDRKRYTSTKEVL |
| | | DATLIHQSITGLYETRIDLSQLGGDPKKKRKVSGSETPGTSESATPEST |
| | | GMGKKTKRTADSSSSEDEEEYVVEKVLDRRVVKGQVEYLLKWKGF |
| | | SEEHNTWEPEKNLDCPELISEFMKKYKKMKEGENNKPREKSESNKR |
| | | KSNFSNSADDIKSKKKREQSNDIARGFERGLEPEKIIGATDSCGDLMF |
| | | LMKWKGTDEADLVLAKEANVKCPQIVIAFYEERLTWHAYPEDAEN |
| | | KEKETAKS |
| 997 | DNMT3A/ | MNHDQEFDPPKVYPPVPAEKRKPIRVLSLFDGIATGLLVLKDLGIQV |
| | L- | DRYIASEVCEDSITVGMVRHQGKIMYVGDVRSVTQKHIQEWGPFDL |
| | dSpCas9- | VIGGSPCNDLSIVNPARKGLYEGTGRLFFEFYRLLHDARPKEGDDRPF |
| | XTEN16- | FWLFENVVAMGVSDKRDISRFLESNPVMIDAKEVSAAHRARYFWG |
| | EED | NLPGMNRPLASTVNDKLELQECLEHGRIAKFSKVRTITTRSNSIKQGK |
| | | DQHFPVFMNEKEDILWCTEMERVFGFPVHYTDVSNMSRLARQRLLG |
| | | RSWSVPVIRHLFAPLKEYFACVSSGNSNANSRGPSFSSGLVPLSLRGS |
| | | HMGPMEIYKTVSAWKRQPVRVLSLFRNIDKVLKSLGFLESGSGSGG |
| | | GTLKYVEDVTNVVRRDVEKWGPFDLVYGSTQPLGSSCDRCPGWYM |
| | | FQFHRILQYALPRQESQRPFFWIFMDNLLLTEDDQETTTRFLQTEAVT |
| | | LQDVRGRDYQNAMRVWSNIPGLKSKHAPLTPKEEEYLQAQVRSRSK |
| | | LDAPKVDLLVKNCLLPLREYFKYFSQNSLPLGGPSSGAPPPSGGSPAG |
| | | SPTSTEEGTSESATPESGPGTSTEPSEGSAPGSPAGSPTSTEEGTSTEPS |
| | | EGSAPGTSTEPSEPKKKRKVYMDKKYSIGLAIGTNSVGWAVITDEYK |
| | | VPSKKFKVLGNTDRHSIKKNLIGALLFDSGETAEATRLKRTARRRYT |
| | | RRKNRICYLQEIFSNEMAKVDDSFFHRLEESFLVEEDKKHERHPIFGN |
| | | IVDEVAYHEKYPTIYHLRKKLVDSTDKADLRLIYLALAHMIKFRGHF |
| | | LIEGDLNPDNSDVDKLFIQLVQTYNQLFEENPINASGVDAKAILSARL |
| | | SKSRRLENLIAQLPGEKKNGLFGNLIALSLGLTPNFKSNFDLAEDAKL |
| | | QLSKDTYDDDLDNLLAQIGDQYADLFLAAKNLSDAILLSDILRVNTE |
| | | ITKAPLSASMIKRYDEHHQDLTLLKALVRQQLPEKYKEIFFDQSKNG |
| | | YAGYIDGGASQEEFYKFIKPILEKMDGTEELLVKLNREDLLRKQRTF |
| | | DNGSIPHQIHLGELHAILRRQEDFYPFLKDNREKIEKILTFRIPYYVGP |
| | | LARGNSRFAWMTRKSEETITPWNFEEVVDKGASAQSFIERMTNFDK |
| | | NLPNEKVLPKHSLLYEYFTVYNELTKVKYVTEGMRKPAFLSGEQKK |
| | | AIVDLLFKTNRKVTVKQLKEDYFKKIECFDSVEISGVEDRFNASLGT |
| | | YHDLLKIIKDKDFLDNEENEDILEDIVLTLTLFEDREMIEERLKTYAH |
| | | LFDDKVMKQLKRRRYTGWGRLSRKLINGIRDKQSGKTILDFLKSDG |
| | | FANRNFMQLIHDDSLTFKEDIQKAQVSGQGDSLHEHIANLAGSPAIK |
| | | KGILQTVKVVDELVKVMGRHKPENIVIEMARENQTTQKGQKNSRER |
| | | MKRIEEGIKELGSQILKEHPVENTQLQNEKLYLYYLQNGRDMYVDQ |
| | | ELDINRLSDYDVDAIVPQSFLKDDSIDNKVLTRSDKNRGKSDNVPSE |
| | | EVVKKMKNYWRQLLNAKLITQRKFDNLTKAERGGLSELDKAGFIKR |
| | | QLVETRQITKHVAQILDSRMNTKYDENDKLIREVKVITLKSKLVSDF |
| | | RKDFQFYKVREINNYHHAHDAYLNAVVGTALIKKYPKLESEFVYGD |
| | | YKVYDVRKMIAKSEQEIGKATAKYFFYSNIMNFFKTEITLANGEIRK |
| | | RPLIETNGETGEIVWDKGRDFATVRKVLSMPQVNIVKKTEVQTGGFS |
| | | KESILPKRNSDKLIARKKDWDPKKYGGFDSPTVAYSVLVVAKVEKG |
| | | KSKKLKSVKELLGITIMERSSFEKNPIDFLEAKGYKEVKKDLIIKLPKY |
| | | SLFELENGRKRMLASAGELQKGNELALPSKYVNFLYLASHYEKLKG |
| | | SPEDNEQKQLFVEQHKHYLDEIIEQISEFSKRVILADANLDKVLSAYN |
| | | KHRDKPIREQAENIIHLFTLTNLGAPAAFKYFDTTIDRKRYTSTKEVL |
| | | DATLIHQSITGLYETRIDLSQLGGDPKKKRKVSGSETPGTSESATPEST |
| | | GMSEREVSTAPAGTDMPAAKKQKLSSDENSNPDLSGDENDDAVSIE |
| | | SGTNTERPDTPTNTPNAPGRKSWGKGKWKSKKCKYSFKCVNSLKED |
| | | HNQPLFGVQFNWHSKEGDPLVFATVGSNRVTLYECHSQGEIRLLQS |
| | | YVDADADENFYTCAWTYDSNTSHPLLAVAGSRGIIRIINPITMQCIKH |
| | | YVGHGNAINELKFHPRDPNLLLSVSKDHALRLWNIQTDTLVAIFGGV |
| | | EGHRDEVLSADYDLLGEKIMSCGMDHSLKLWRINSKRMMNAIKESY |
| | | DYNPNKTNRPFISQKIHFPDFSTRDIHRNYVDCVRWLGDLILSKSCEN |
| | | AIVCWKPGKMEDDIDKIKPSESNVTILGRFDYSQCDIWYMRFSMDF |
| | | WQKMLALGNQVGKLYVWDLEVEDPHKAKCTTLTHHKCGAAIRQT |
| | | SFSRDSSILIAVCDDASIWRWDRLR |
| 998 | DNMT3A/ | MNHDQEFDPPKVYPPVPAEKRKPIRVLSLFDGIATGLLVLKDLGIQV |
| | L- | DRYIASEVCEDSITVGMVRHQGKIMYVGDVRSVTQKHIQEWGPFDL |
| | dSpCas9- | VIGGSPCNDLSIVNPARKGLYEGTGRLFFEFYRLLHDARPKEGDDRPF |
| | XTEN16- | FWLFENVVAMGVSDKRDISRFLESNPVMIDAKEVSAAHRARYFWG |
| | RBBP4 | NLPGMNRPLASTVNDKLELQECLEHGRIAKFSKVRTITTRSNSIKQGK |
| | | DQHFPVFMNEKEDILWCTEMERVFGFPVHYTDVSNMSRLARQRLLG |
| | | RSWSVPVIRHLFAPLKEYFACVSSGNSNANSRGPSFSSGLVPLSLRGS |
| | | HMGPMEIYKTVSAWKRQPVRVLSLFRNIDKVLKSLGFLESGSGSGG |
| | | GTLKYVEDVTNVVRRDVEKWGPFDLVYGSTQPLGSSCDRCPGWYM |
| | | FQFHRILQYALPRQESQRPFFWIFMDNLLLTEDDQETTTRFLQTEAVT |
| | | LQDVRGRDYQNAMRVWSNIPGLKSKHAPLTPKEEEYLQAQVRSRSK |
| | | LDAPKVDLLVKNCLLPLREYFKYFSQNSLPLGGPSSGAPPPSGGSPAG |
| | | SPTSTEEGTSESATPESGPGTSTEPSEGSAPGSPAGSPTSTEEGTSTEPS |
| | | EGSAPGTSTEPSEPKKKRKVYMDKKYSIGLAIGTNSVGWAVITDEYK |
| | | VPSKKFKVLGNTDRHSIKKNLIGALLFDSGETAEATRLKRTARRRYT |
| | | RRKNRICYLQEIFSNEMAKVDDSFFHRLEESFLVEEDKKHERHPIFGN |
| | | IVDEVAYHEKYPTIYHLRKKLVDSTDKADLRLIYLALAHMIKFRGHF |
| | | LIEGDLNPDNSDVDKLFIQLVQTYNQLFEENPINASGVDAKAILSARL |
| | | SKSRRLENLIAQLPGEKKNGLFGNLIALSLGLTPNFKSNFDLAEDAKL |
| | | QLSKDTYDDDLDNLLAQIGDQYADLFLAAKNLSDAILLSDILRVNTE |
| | | ITKAPLSASMIKRYDEHHQDLTLLKALVRQQLPEKYKEIFFDQSKNG |
| | | YAGYIDGGASQEEFYKFIKPILEKMDGTEELLVKLNREDLLRKQRTF |
| | | DNGSIPHQIHLGELHAILRRQEDFYPFLKDNREKIEKILTFRIPYYVGP |
| | | LARGNSRFAWMTRKSEETITPWNFEEVVDKGASAQSFIERMTNFDK |
| | | NLPNEKVLPKHSLLYEYFTVYNELTKVKYVTEGMRKPAFLSGEQKK |
| | | AIVDLLFKTNRKVTVKQLKEDYFKKIECFDSVEISGVEDRFNASLGT |
| | | YHDLLKIIKDKDFLDNEENEDILEDIVLTLTLFEDREMIEERLKTYAH |
| | | LFDDKVMKQLKRRRYTGWGRLSRKLINGIRDKQSGKTILDFLKSDG |
| | | FANRNFMQLIHDDSLTFKEDIQKAQVSGQGDSLHEHIANLAGSPAIK |
| | | KGILQTVKVVDELVKVMGRHKPENIVIEMARENQTTQKGQKNSRER |
| | | MKRIEEGIKELGSQILKEHPVENTQLQNEKLYLYYLQNGRDMYVDQ |
| | | ELDINRLSDYDVDAIVPQSFLKDDSIDNKVLTRSDKNRGKSDNVPSE |
| | | EVVKKMKNYWRQLLNAKLITQRKFDNLTKAERGGLSELDKAGFIKR |
| | | QLVETRQITKHVAQILDSRMNTKYDENDKLIREVKVITLKSKLVSDF |
| | | RKDFQFYKVREINNYHHAHDAYLNAVVGTALIKKYPKLESEFVYGD |
| | | YKVYDVRKMIAKSEQEIGKATAKYFFYSNIMNFFKTEITLANGEIRK |
| | | RPLIETNGETGEIVWDKGRDFATVRKVLSMPQVNIVKKTEVQTGGFS |
| | | KESILPKRNSDKLIARKKDWDPKKYGGFDSPTVAYSVLVVAKVEKG |
| | | KSKKLKSVKELLGITIMERSSFEKNPIDFLEAKGYKEVKKDLIIKLPKY |
| | | SLFELENGRKRMLASAGELQKGNELALPSKYVNFLYLASHYEKLKG |
| | | SPEDNEQKQLFVEQHKHYLDEIIEQISEFSKRVILADANLDKVLSAYN |
| | | KHRDKPIREQAENIIHLFTLTNLGAPAAFKYFDTTIDRKRYTSTKEVL |
| | | DATLIHQSITGLYETRIDLSQLGGDPKKKRKVSGSETPGTSESATPEST |
| | | GMADKEAAFDDAVEERVINEEYKIWKKNTPFLYDLVMTHALEWPS |
| | | LTAQWLPDVTRPEGKDFSIHRLVLGTHTSDEQNHLVIASVQLPNDDA |
| | | QFDASHYDSEKGEFGGFGSVSGKIEIEIKINHEGEVNRARYMPQNPCII |
| | | ATKTPSSDVLVFDYTKHPSKPDPSGECNPDLRLRGHQKEGYGLSWN |
| | | PNLSGHLLSASDDHTICLWDISAVPKEGKVVDAKTIFTGHTAVVEDV |
| | | SWHLLHESLFGSVADDQKLMIWDTRSNNTSKPSHSVDAHTAEVNCL |
| | | SFNPYSEFILATGSADKTVALWDLRNLKLKLHSFESHKDEIFQVQWS |
| | | PHNETILASSGTDRRLNVWDLSKIGEEQSPEDAEDGPPELLFIHGGHT |
| | | AKISDFSWNPNEPWVICSVSEDNIMQVWQMAENIYNDEDPEGSVDP |
| | | EGQGS |
| 999 | DNMT3A/ | MNHDQEFDPPKVYPPVPAEKRKPIRVLSLFDGIATGLLVLKDLGIQV |
| | L- | DRYIASEVCEDSITVGMVRHQGKIMYVGDVRSVTQKHIQEWGPFDL |
| | dSpCas9- | VIGGSPCNDLSIVNPARKGLYEGTGRLFFEFYRLLHDARPKEGDDRPF |
| | XTEN16- | FWLFENVVAMGVSDKRDISRFLESNPVMIDAKEVSAAHRARYFWG |
| | RCOR1 | NLPGMNRPLASTVNDKLELQECLEHGRIAKFSKVRTITTRSNSIKQGK |
| | | DQHFPVFMNEKEDILWCTEMERVFGFPVHYTDVSNMSRLARQRLLG |
| | | RSWSVPVIRHLFAPLKEYFACVSSGNSNANSRGPSFSSGLVPLSLRGS |
| | | HMGPMEIYKTVSAWKRQPVRVLSLFRNIDKVLKSLGFLESGSGSGG |
| | | GTLKYVEDVTNVVRRDVEKWGPFDLVYGSTQPLGSSCDRCPGWYM |
| | | FQFHRILQYALPRQESQRPFFWIFMDNLLLTEDDQETTTRFLQTEAVT |
| | | LQDVRGRDYQNAMRVWSNIPGLKSKHAPLTPKEEEYLQAQVRSRSK |
| | | LDAPKVDLLVKNCLLPLREYFKYFSQNSLPLGGPSSGAPPPSGGSPAG |
| | | SPTSTEEGTSESATPESGPGTSTEPSEGSAPGSPAGSPTSTEEGTSTEPS |
| | | EGSAPGTSTEPSEPKKKRKVYMDKKYSIGLAIGTNSVGWAVITDEYK |
| | | VPSKKFKVLGNTDRHSIKKNLIGALLFDSGETAEATRLKRTARRRYT |
| | | RRKNRICYLQEIFSNEMAKVDDSFFHRLEESFLVEEDKKHERHPIFGN |
| | | IVDEVAYHEKYPTIYHLRKKLVDSTDKADLRLIYLALAHMIKFRGHF |
| | | LIEGDLNPDNSDVDKLFIQLVQTYNQLFEENPINASGVDAKAILSARL |
| | | SKSRRLENLIAQLPGEKKNGLFGNLIALSLGLTPNFKSNFDLAEDAKL |
| | | QLSKDTYDDDLDNLLAQIGDQYADLFLAAKNLSDAILLSDILRVNTE |
| | | ITKAPLSASMIKRYDEHHQDLTLLKALVRQQLPEKYKEIFFDQSKNG |
| | | YAGYIDGGASQEEFYKFIKPILEKMDGTEELLVKLNREDLLRKQRTF |
| | | DNGSIPHQIHLGELHAILRRQEDFYPFLKDNREKIEKILTFRIPYYVGP |
| | | LARGNSRFAWMTRKSEETITPWNFEEVVDKGASAQSFIERMTNFDK |
| | | NLPNEKVLPKHSLLYEYFTVYNELTKVKYVTEGMRKPAFLSGEQKK |
| | | AIVDLLFKTNRKVTVKQLKEDYFKKIECFDSVEISGVEDRFNASLGT |
| | | YHDLLKIIKDKDFLDNEENEDILEDIVLTLTLFEDREMIEERLKTYAH |
| | | LFDDKVMKQLKRRRYTGWGRLSRKLINGIRDKQSGKTILDFLKSDG |
| | | FANRNFMQLIHDDSLTFKEDIQKAQVSGQGDSLHEHIANLAGSPAIK |
| | | KGILQTVKVVDELVKVMGRHKPENIVIEMARENQTTQKGQKNSRER |
| | | MKRIEEGIKELGSQILKEHPVENTQLQNEKLYLYYLQNGRDMYVDQ |
| | | ELDINRLSDYDVDAIVPQSFLKDDSIDNKVLTRSDKNRGKSDNVPSE |
| | | EVVKKMKNYWRQLLNAKLITQRKFDNLTKAERGGLSELDKAGFIKR |
| | | QLVETRQITKHVAQILDSRMNTKYDENDKLIREVKVITLKSKLVSDF |
| | | RKDFQFYKVREINNYHHAHDAYLNAVVGTALIKKYPKLESEFVYGD |
| | | YKVYDVRKMIAKSEQEIGKATAKYFFYSNIMNFFKTEITLANGEIRK |
| | | RPLIETNGETGEIVWDKGRDFATVRKVLSMPQVNIVKKTEVQTGGFS |
| | | KESILPKRNSDKLIARKKDWDPKKYGGFDSPTVAYSVLVVAKVEKG |
| | | KSKKLKSVKELLGITIMERSSFEKNPIDFLEAKGYKEVKKDLIIKLPKY |
| | | SLFELENGRKRMLASAGELQKGNELALPSKYVNFLYLASHYEKLKG |
| | | SPEDNEQKQLFVEQHKHYLDEIIEQISEFSKRVILADANLDKVLSAYN |
| | | KHRDKPIREQAENIIHLFTLTNLGAPAAFKYFDTTIDRKRYTSTKEVL |
| | | DATLIHQSITGLYETRIDLSQLGGDPKKKRKVSGSETPGTSESATPEST |
| | | GMPAMVEKGPEVSGKRRGRNNAAASASAAAASAAASAACASPAAT |
| | | AASGAAASSASAAAASAAAAPNNGQNKSLAAAAPNGNSSSNSWEE |
| | | GSSGSSSDEEHGGGGMRVGPQYQAVVPDFDPAKLARRSQERDNLG |
| | | MLVWSPNQNLSEAKLDEYIAIAKEKHGYNMEQALGMLFWHKHNIE |
| | | KSLADLPNFTPFPDEWTVEDKVLFEQAFSFHGKTFHRIQQMLPDKSI |
| | | ASLVKFYYSWKKTRTKTSVMDRHARKQKREREESEDELEEANGNN |
| | | PIDIEVDQNKESKKEVPPTETVPQVKKEKHSTQAKNRAKRKPPKGMF |
| | | LSQEDVEAVSANATAATTVLRQLDMELVSVKRQIQNIKQTNSALKE |
| | | KLDGGIEPYRLPEVIQKCNARWTTEEQLLAVQAIRKYGRDFQAISDVI |
| | | GNKSVVQVKNFFVNYRRRFNIDEVLQEWEAEHGKEETNGPSNQKPV |
| | | KSPDNSIKMPEEEDEAPVLDVRYASAS |
| 1000 | DNMT3A/ | MNHDQEFDPPKVYPPVPAEKRKPIRVLSLFDGIATGLLVLKDLGIQV |
| | L- | DRYIASEVCEDSITVGMVRHQGKIMYVGDVRSVTQKHIQEWGPFDL |
| | dSpCas9- | VIGGSPCNDLSIVNPARKGLYEGTGRLFFEFYRLLHDARPKEGDDRPF |
| | XTEN16- | FWLFENVVAMGVSDKRDISRFLESNPVMIDAKEVSAAHRARYFWG |
| | EZH2 | NLPGMNRPLASTVNDKLELQECLEHGRIAKFSKVRTITTRSNSIKQGK |
| | | DQHFPVFMNEKEDILWCTEMERVFGFPVHYTDVSNMSRLARQRLLG |
| | | RSWSVPVIRHLFAPLKEYFACVSSGNSNANSRGPSFSSGLVPLSLRGS |
| | | HMGPMEIYKTVSAWKRQPVRVLSLFRNIDKVLKSLGFLESGSGSGG |
| | | GTLKYVEDVTNVVRRDVEKWGPFDLVYGSTQPLGSSCDRCPGWYM |
| | | FQFHRILQYALPRQESQRPFFWIFMDNLLLTEDDQETTTRFLQTEAVT |
| | | LQDVRGRDYQNAMRVWSNIPGLKSKHAPLTPKEEEYLQAQVRSRSK |
| | | LDAPKVDLLVKNCLLPLREYFKYFSQNSLPLGGPSSGAPPPSGGSPAG |
| | | SPTSTEEGTSESATPESGPGTSTEPSEGSAPGSPAGSPTSTEEGTSTEPS |
| | | EGSAPGTSTEPSEPKKKRKVYMDKKYSIGLAIGTNSVGWAVITDEYK |
| | | VPSKKFKVLGNTDRHSIKKNLIGALLFDSGETAEATRLKRTARRRYT |
| | | RRKNRICYLQEIFSNEMAKVDDSFFHRLEESFLVEEDKKHERHPIFGN |
| | | IVDEVAYHEKYPTIYHLRKKLVDSTDKADLRLIYLALAHMIKFRGHF |
| | | LIEGDLNPDNSDVDKLFIQLVQTYNQLFEENPINASGVDAKAILSARL |
| | | SKSRRLENLIAQLPGEKKNGLFGNLIALSLGLTPNFKSNFDLAEDAKL |
| | | QLSKDTYDDDLDNLLAQIGDQYADLFLAAKNLSDAILLSDILRVNTE |
| | | ITKAPLSASMIKRYDEHHQDLTLLKALVRQQLPEKYKEIFFDQSKNG |
| | | YAGYIDGGASQEEFYKFIKPILEKMDGTEELLVKLNREDLLRKQRTF |
| | | DNGSIPHQIHLGELHAILRRQEDFYPFLKDNREKIEKILTFRIPYYVGP |
| | | LARGNSRFAWMTRKSEETITPWNFEEVVDKGASAQSFIERMTNFDK |
| | | NLPNEKVLPKHSLLYEYFTVYNELTKVKYVTEGMRKPAFLSGEQKK |
| | | AIVDLLFKTNRKVTVKQLKEDYFKKIECFDSVEISGVEDRFNASLGT |
| | | YHDLLKIIKDKDFLDNEENEDILEDIVLTLTLFEDREMIEERLKTYAH |
| | | LFDDKVMKQLKRRRYTGWGRLSRKLINGIRDKQSGKTILDFLKSDG |
| | | FANRNFMQLIHDDSLTFKEDIQKAQVSGQGDSLHEHIANLAGSPAIK |
| | | KGILQTVKVVDELVKVMGRHKPENIVIEMARENQTTQKGQKNSRER |
| | | MKRIEEGIKELGSQILKEHPVENTQLQNEKLYLYYLQNGRDMYVDQ |
| | | ELDINRLSDYDVDAIVPQSFLKDDSIDNKVLTRSDKNRGKSDNVPSE |
| | | EVVKKMKNYWRQLLNAKLITQRKFDNLTKAERGGLSELDKAGFIKR |
| | | QLVETRQITKHVAQILDSRMNTKYDENDKLIREVKVITLKSKLVSDF |
| | | RKDFQFYKVREINNYHHAHDAYLNAVVGTALIKKYPKLESEFVYGD |
| | | YKVYDVRKMIAKSEQEIGKATAKYFFYSNIMNFFKTEITLANGEIRK |
| | | RPLIETNGETGEIVWDKGRDFATVRKVLSMPQVNIVKKTEVQTGGFS |
| | | KESILPKRNSDKLIARKKDWDPKKYGGFDSPTVAYSVLVVAKVEKG |
| | | KSKKLKSVKELLGITIMERSSFEKNPIDFLEAKGYKEVKKDLIIKLPKY |
| | | SLFELENGRKRMLASAGELQKGNELALPSKYVNFLYLASHYEKLKG |
| | | SPEDNEQKQLFVEQHKHYLDEIIEQISEFSKRVILADANLDKVLSAYN |
| | | KHRDKPIREQAENIIHLFTLTNLGAPAAFKYFDTTIDRKRYTSTKEVL |
| | | DATLIHQSITGLYETRIDLSQLGGDPKKKRKVSGSETPGTSESATPEST |
| | | GMGQTGKKSEKGPVCWRKRVKSEYMRLRQLKRFRRADEVKSMFSS |
| | | NRQKILERTEILNQEWKQRRIQPVHILTSVSSLRGTRECSVTSDLDFPT |
| | | QVIPLKTLNAVASVPIMYSWSPLQQNFMVEDETVLHNIPYMGDEVL |
| | | DQDGTFIEELIKNYDGKVHGDRECGFINDEIFVELVNALGQYNDDDD |
| | | DDDGDDPEEREEKQKDLEDHRDDKESRPPRKFPSDKIFEAISSMFPD |
| | | KGTAEELKEKYKELTEQQLPGALPPECTPNIDGPNAKSVQREQSLHS |
| | | FHTLFCRRCFKYDCFLHPFHATPNTYKRKNTETALDNKPCGPQCYQ |
| | | HLEGAKEFAAALTAERIKTPPKRPGGRRRGRLPNNSSRPSTPTINVLE |
| | | SKDTDSDREAGTETGGENNDKEEEEKKDETSSSSEANSRCQTPIKMK |
| | | PNIEPPENVEWSGAEASMFRVLIGTYYDNFCAIARLIGTKTCRQVYEF |
| | | RVKESSIIAPAPAEDVDTPPRKKKRKHRLWAAHCRKIQLKKDGSSNH |
| | | VYNYQPCDHPRQPCDSSCPCVIAQNFCEKFCQCSSECQNRFPGCRCK |
| | | AQCNTKQCPCYLAVRECDPDLCLTCGAADHWDSKNVSCKNCSIQR |
| | | GSKKHLLLAPSDVAGWGIFIKDPVQKNEFISEYCGEIISQDEADRRGK |
| | | VYDKYMCSFLFNLNNDFVVDATRKGNKIRFANHSVNPNCYAKVMM |
| | | VNGDHRIGIFAKRAIQTGEELFFDYRYSQADALKYVGIEREMEIP |
| 1001 | :DNMT3A/ | MNHDQEFDPPKVYPPVPAEKRKPIRVLSLFDGIATGLLVLKDLGIQV |
| | L- | DRYIASEVCEDSITVGMVRHQGKIMYVGDVRSVTQKHIQEWGPFDL |
| | dSpCas9- | VIGGSPCNDLSIVNPARKGLYEGTGRLFFEFYRLLHDARPKEGDDRPF |
| | XTEN16- | FWLFENVVAMGVSDKRDISRFLESNPVMIDAKEVSAAHRARYFWG |
| | KOX1KR | NLPGMNRPLASTVNDKLELQECLEHGRIAKFSKVRTITTRSNSIKQGK |
| | AB-ZIM3 | DQHFPVFMNEKEDILWCTEMERVFGFPVHYTDVSNMSRLARQRLLG |
| | | RSWSVPVIRHLFAPLKEYFACVSSGNSNANSRGPSFSSGLVPLSLRGS |
| | | HMGPMEIYKTVSAWKRQPVRVLSLFRNIDKVLKSLGFLESGSGSGG |
| | | GTLKYVEDVTNVVRRDVEKWGPFDLVYGSTQPLGSSCDRCPGWYM |
| | | FQFHRILQYALPRQESQRPFFWIFMDNLLLTEDDQETTTRFLQTEAVT |
| | | LQDVRGRDYQNAMRVWSNIPGLKSKHAPLTPKEEEYLQAQVRSRSK |
| | | LDAPKVDLLVKNCLLPLREYFKYFSQNSLPLGGPSSGAPPPSGGSPAG |
| | | SPTSTEEGTSESATPESGPGTSTEPSEGSAPGSPAGSPTSTEEGTSTEPS |
| | | EGSAPGTSTEPSEPKKKRKVYMDKKYSIGLAIGTNSVGWAVITDEYK |
| | | VPSKKFKVLGNTDRHSIKKNLIGALLFDSGETAEATRLKRTARRRYT |
| | | RRKNRICYLQEIFSNEMAKVDDSFFHRLEESFLVEEDKKHERHPIFGN |
| | | IVDEVAYHEKYPTIYHLRKKLVDSTDKADLRLIYLALAHMIKFRGHF |
| | | LIEGDLNPDNSDVDKLFIQLVQTYNQLFEENPINASGVDAKAILSARL |
| | | SKSRRLENLIAQLPGEKKNGLFGNLIALSLGLTPNFKSNFDLAEDAKL |
| | | QLSKDTYDDDLDNLLAQIGDQYADLFLAAKNLSDAILLSDILRVNTE |
| | | ITKAPLSASMIKRYDEHHQDLTLLKALVRQQLPEKYKEIFFDQSKNG |
| | | YAGYIDGGASQEEFYKFIKPILEKMDGTEELLVKLNREDLLRKQRTF |
| | | DNGSIPHQIHLGELHAILRRQEDFYPFLKDNREKIEKILTFRIPYYVGP |
| | | LARGNSRFAWMTRKSEETITPWNFEEVVDKGASAQSFIERMTNFDK |
| | | NLPNEKVLPKHSLLYEYFTVYNELTKVKYVTEGMRKPAFLSGEQKK |
| | | AIVDLLFKTNRKVTVKQLKEDYFKKIECFDSVEISGVEDRFNASLGT |
| | | YHDLLKIIKDKDFLDNEENEDILEDIVLTLTLFEDREMIEERLKTYAH |
| | | LFDDKVMKQLKRRRYTGWGRLSRKLINGIRDKQSGKTILDFLKSDG |
| | | FANRNFMQLIHDDSLTFKEDIQKAQVSGQGDSLHEHIANLAGSPAIK |
| | | KGILQTVKVVDELVKVMGRHKPENIVIEMARENQTTQKGQKNSRER |
| | | MKRIEEGIKELGSQILKEHPVENTQLQNEKLYLYYLQNGRDMYVDQ |
| | | ELDINRLSDYDVDAIVPQSFLKDDSIDNKVLTRSDKNRGKSDNVPSE |
| | | EVVKKMKNYWRQLLNAKLITQRKFDNLTKAERGGLSELDKAGFIKR |
| | | QLVETRQITKHVAQILDSRMNTKYDENDKLIREVKVITLKSKLVSDF |
| | | RKDFQFYKVREINNYHHAHDAYLNAVVGTALIKKYPKLESEFVYGD |
| | | YKVYDVRKMIAKSEQEIGKATAKYFFYSNIMNFFKTEITLANGEIRK |
| | | RPLIETNGETGEIVWDKGRDFATVRKVLSMPQVNIVKKTEVQTGGFS |
| | | KESILPKRNSDKLIARKKDWDPKKYGGFDSPTVAYSVLVVAKVEKG |
| | | KSKKLKSVKELLGITIMERSSFEKNPIDFLEAKGYKEVKKDLIIKLPKY |
| | | SLFELENGRKRMLASAGELQKGNELALPSKYVNFLYLASHYEKLKG |
| | | SPEDNEQKQLFVEQHKHYLDEIIEQISEFSKRVILADANLDKVLSAYN |
| | | KHRDKPIREQAENIIHLFTLTNLGAPAAFKYFDTTIDRKRYTSTKEVL |
| | | DATLIHQSITGLYETRIDLSQLGGDPKKKRKVSGSETPGTSESATPEST |
| | | GRTLVTFKDVFVDFTREEWKLLDTAQQIVYRNVMLENYKNLVSLG |
| | | YQLTKPDVILRLEKGEEPSTEPSEGSAPGTSTEPSETGMNNSQGRVTF |
| | | EDVTVNFTQGEWQRLNPEQRNLYRDVMLENYSNLVSVGQGETTKP |
| | | DVILRLEQGKEPWLEEEEVLGSGRAEKNGDIGGQIWKPKDVKESL |
| 1002 | :DNMT3A/ | MNHDQEFDPPKVYPPVPAEKRKPIRVLSLFDGIATGLLVLKDLGIQV |
| | L- | DRYIASEVCEDSITVGMVRHQGKIMYVGDVRSVTQKHIQEWGPFDL |
| | dSpCas9- | VIGGSPCNDLSIVNPARKGLYEGTGRLFFEFYRLLHDARPKEGDDRPF |
| | XTEN16- | FWLFENVVAMGVSDKRDISRFLESNPVMIDAKEVSAAHRARYFWG |
| | KOX1KR | NLPGMNRPLASTVNDKLELQECLEHGRIAKFSKVRTITTRSNSIKQGK |
| | AB-ZFP28 | DQHFPVFMNEKEDILWCTEMERVFGFPVHYTDVSNMSRLARQRLLG |
| | | RSWSVPVIRHLFAPLKEYFACVSSGNSNANSRGPSFSSGLVPLSLRGS |
| | | HMGPMEIYKTVSAWKRQPVRVLSLFRNIDKVLKSLGFLESGSGSGG |
| | | GTLKYVEDVTNVVRRDVEKWGPFDLVYGSTQPLGSSCDRCPGWYM |
| | | FQFHRILQYALPRQESQRPFFWIFMDNLLLTEDDQETTTRFLQTEAVT |
| | | LQDVRGRDYQNAMRVWSNIPGLKSKHAPLTPKEEEYLQAQVRSRSK |
| | | LDAPKVDLLVKNCLLPLREYFKYFSQNSLPLGGPSSGAPPPSGGSPAG |
| | | SPTSTEEGTSESATPESGPGTSTEPSEGSAPGSPAGSPTSTEEGTSTEPS |
| | | EGSAPGTSTEPSEPKKKRKVYMDKKYSIGLAIGTNSVGWAVITDEYK |
| | | VPSKKFKVLGNTDRHSIKKNLIGALLFDSGETAEATRLKRTARRRYT |
| | | RRKNRICYLQEIFSNEMAKVDDSFFHRLEESFLVEEDKKHERHPIFGN |
| | | IVDEVAYHEKYPTIYHLRKKLVDSTDKADLRLIYLALAHMIKFRGHF |
| | | LIEGDLNPDNSDVDKLFIQLVQTYNQLFEENPINASGVDAKAILSARL |
| | | SKSRRLENLIAQLPGEKKNGLFGNLIALSLGLTPNFKSNFDLAEDAKL |
| | | QLSKDTYDDDLDNLLAQIGDQYADLFLAAKNLSDAILLSDILRVNTE |
| | | ITKAPLSASMIKRYDEHHQDLTLLKALVRQQLPEKYKEIFFDQSKNG |
| | | YAGYIDGGASQEEFYKFIKPILEKMDGTEELLVKLNREDLLRKQRTF |
| | | DNGSIPHQIHLGELHAILRRQEDFYPFLKDNREKIEKILTFRIPYYVGP |
| | | LARGNSRFAWMTRKSEETITPWNFEEVVDKGASAQSFIERMTNFDK |
| | | NLPNEKVLPKHSLLYEYFTVYNELTKVKYVTEGMRKPAFLSGEQKK |
| | | AIVDLLFKTNRKVTVKQLKEDYFKKIECFDSVEISGVEDRFNASLGT |
| | | YHDLLKIIKDKDFLDNEENEDILEDIVLTLTLFEDREMIEERLKTYAH |
| | | LFDDKVMKQLKRRRYTGWGRLSRKLINGIRDKQSGKTILDFLKSDG |
| | | FANRNFMQLIHDDSLTFKEDIQKAQVSGQGDSLHEHIANLAGSPAIK |
| | | KGILQTVKVVDELVKVMGRHKPENIVIEMARENQTTQKGQKNSRER |
| | | MKRIEEGIKELGSQILKEHPVENTQLQNEKLYLYYLQNGRDMYVDQ |
| | | ELDINRLSDYDVDAIVPQSFLKDDSIDNKVLTRSDKNRGKSDNVPSE |
| | | EVVKKMKNYWRQLLNAKLITQRKFDNLTKAERGGLSELDKAGFIKR |
| | | QLVETRQITKHVAQILDSRMNTKYDENDKLIREVKVITLKSKLVSDF |
| | | RKDFQFYKVREINNYHHAHDAYLNAVVGTALIKKYPKLESEFVYGD |
| | | YKVYDVRKMIAKSEQEIGKATAKYFFYSNIMNFFKTEITLANGEIRK |
| | | RPLIETNGETGEIVWDKGRDFATVRKVLSMPQVNIVKKTEVQTGGFS |
| | | KESILPKRNSDKLIARKKDWDPKKYGGFDSPTVAYSVLVVAKVEKG |
| | | KSKKLKSVKELLGITIMERSSFEKNPIDFLEAKGYKEVKKDLIIKLPKY |
| | | SLFELENGRKRMLASAGELQKGNELALPSKYVNFLYLASHYEKLKG |
| | | SPEDNEQKQLFVEQHKHYLDEIIEQISEFSKRVILADANLDKVLSAYN |
| | | KHRDKPIREQAENIIHLFTLTNLGAPAAFKYFDTTIDRKRYTSTKEVL |
| | | DATLIHQSITGLYETRIDLSQLGGDPKKKRKVSGSETPGTSESATPEST |
| | | GRTLVTFKDVFVDFTREEWKLLDTAQQIVYRNVMLENYKNLVSLG |
| | | YQLTKPDVILRLEKGEEPSTEPSEGSAPGTSTEPSETGNKKLEAVGTGI |
| | | EPKAMSQGLVTFGDVAVDFSQEEWEWLNPIQRNLYRKVMLENYRN |
| | | LASLGLCVSKPDVISSLEQGKEPW |
| 1003 | :DNMT3A/ | MNHDQEFDPPKVYPPVPAEKRKPIRVLSLFDGIATGLLVLKDLGIQV |
| | L- | DRYIASEVCEDSITVGMVRHQGKIMYVGDVRSVTQKHIQEWGPFDL |
| | dSpCas9- | VIGGSPCNDLSIVNPARKGLYEGTGRLFFEFYRLLHDARPKEGDDRPF |
| | XTEN16- | FWLFENVVAMGVSDKRDISRFLESNPVMIDAKEVSAAHRARYFWG |
| | KOX1KR | NLPGMNRPLASTVNDKLELQECLEHGRIAKFSKVRTITTRSNSIKQGK |
| | AB-ZN627 | DQHFPVFMNEKEDILWCTEMERVFGFPVHYTDVSNMSRLARQRLLG |
| | | RSWSVPVIRHLFAPLKEYFACVSSGNSNANSRGPSFSSGLVPLSLRGS |
| | | HMGPMEIYKTVSAWKRQPVRVLSLFRNIDKVLKSLGFLESGSGSGG |
| | | GTLKYVEDVTNVVRRDVEKWGPFDLVYGSTQPLGSSCDRCPGWYM |
| | | FQFHRILQYALPRQESQRPFFWIFMDNLLLTEDDQETTTRFLQTEAVT |
| | | LQDVRGRDYQNAMRVWSNIPGLKSKHAPLTPKEEEYLQAQVRSRSK |
| | | LDAPKVDLLVKNCLLPLREYFKYFSQNSLPLGGPSSGAPPPSGGSPAG |
| | | SPTSTEEGTSESATPESGPGTSTEPSEGSAPGSPAGSPTSTEEGTSTEPS |
| | | EGSAPGTSTEPSEPKKKRKVYMDKKYSIGLAIGTNSVGWAVITDEYK |
| | | VPSKKFKVLGNTDRHSIKKNLIGALLFDSGETAEATRLKRTARRRYT |
| | | RRKNRICYLQEIFSNEMAKVDDSFFHRLEESFLVEEDKKHERHPIFGN |
| | | IVDEVAYHEKYPTIYHLRKKLVDSTDKADLRLIYLALAHMIKFRGHF |
| | | LIEGDLNPDNSDVDKLFIQLVQTYNQLFEENPINASGVDAKAILSARL |
| | | SKSRRLENLIAQLPGEKKNGLFGNLIALSLGLTPNFKSNFDLAEDAKL |
| | | QLSKDTYDDDLDNLLAQIGDQYADLFLAAKNLSDAILLSDILRVNTE |
| | | ITKAPLSASMIKRYDEHHQDLTLLKALVRQQLPEKYKEIFFDQSKNG |
| | | YAGYIDGGASQEEFYKFIKPILEKMDGTEELLVKLNREDLLRKQRTF |
| | | DNGSIPHQIHLGELHAILRRQEDFYPFLKDNREKIEKILTFRIPYYVGP |
| | | LARGNSRFAWMTRKSEETITPWNFEEVVDKGASAQSFIERMTNFDK |
| | | NLPNEKVLPKHSLLYEYFTVYNELTKVKYVTEGMRKPAFLSGEQKK |
| | | AIVDLLFKTNRKVTVKQLKEDYFKKIECFDSVEISGVEDRFNASLGT |
| | | YHDLLKIIKDKDFLDNEENEDILEDIVLTLTLFEDREMIEERLKTYAH |
| | | LFDDKVMKQLKRRRYTGWGRLSRKLINGIRDKQSGKTILDFLKSDG |
| | | FANRNFMQLIHDDSLTFKEDIQKAQVSGQGDSLHEHIANLAGSPAIK |
| | | KGILQTVKVVDELVKVMGRHKPENIVIEMARENQTTQKGQKNSRER |
| | | MKRIEEGIKELGSQILKEHPVENTQLQNEKLYLYYLQNGRDMYVDQ |
| | | ELDINRLSDYDVDAIVPQSFLKDDSIDNKVLTRSDKNRGKSDNVPSE |
| | | EVVKKMKNYWRQLLNAKLITQRKFDNLTKAERGGLSELDKAGFIKR |
| | | QLVETRQITKHVAQILDSRMNTKYDENDKLIREVKVITLKSKLVSDF |
| | | RKDFQFYKVREINNYHHAHDAYLNAVVGTALIKKYPKLESEFVYGD |
| | | YKVYDVRKMIAKSEQEIGKATAKYFFYSNIMNFFKTEITLANGEIRK |
| | | RPLIETNGETGEIVWDKGRDFATVRKVLSMPQVNIVKKTEVQTGGFS |
| | | KESILPKRNSDKLIARKKDWDPKKYGGFDSPTVAYSVLVVAKVEKG |
| | | KSKKLKSVKELLGITIMERSSFEKNPIDFLEAKGYKEVKKDLIIKLPKY |
| | | SLFELENGRKRMLASAGELQKGNELALPSKYVNFLYLASHYEKLKG |
| | | SPEDNEQKQLFVEQHKHYLDEIIEQISEFSKRVILADANLDKVLSAYN |
| | | KHRDKPIREQAENIIHLFTLTNLGAPAAFKYFDTTIDRKRYTSTKEVL |
| | | DATLIHQSITGLYETRIDLSQLGGDPKKKRKVSGSETPGTSESATPEST |
| | | GRTLVTFKDVFVDFTREEWKLLDTAQQIVYRNVMLENYKNLVSLG |
| | | YQLTKPDVILRLEKGEEPSTEPSEGSAPGTSTEPSETGDSVAFEDVAV |
| | | NFTLEEWALLDPSQKNLYRDVMRETFRNLASVGKQWEDQNIEDPFK |
| | | IPRRNISHIPERLCESKEGGQGEE |
| 1004 | :DNMT3A/ | MNHDQEFDPPKVYPPVPAEKRKPIRVLSLFDGIATGLLVLKDLGIQV |
| | L- | DRYIASEVCEDSITVGMVRHQGKIMYVGDVRSVTQKHIQEWGPFDL |
| | dSpCas9- | VIGGSPCNDLSIVNPARKGLYEGTGRLFFEFYRLLHDARPKEGDDRPF |
| | XTEN16- | FWLFENVVAMGVSDKRDISRFLESNPVMIDAKEVSAAHRARYFWG |
| | KOX1KR | NLPGMNRPLASTVNDKLELQECLEHGRIAKFSKVRTITTRSNSIKQGK |
| | AB-RYBP | DQHFPVFMNEKEDILWCTEMERVFGFPVHYTDVSNMSRLARQRLLG |
| | | RSWSVPVIRHLFAPLKEYFACVSSGNSNANSRGPSFSSGLVPLSLRGS |
| | | HMGPMEIYKTVSAWKRQPVRVLSLFRNIDKVLKSLGFLESGSGSGG |
| | | GTLKYVEDVTNVVRRDVEKWGPFDLVYGSTQPLGSSCDRCPGWYM |
| | | FQFHRILQYALPRQESQRPFFWIFMDNLLLTEDDQETTTRFLQTEAVT |
| | | LQDVRGRDYQNAMRVWSNIPGLKSKHAPLTPKEEEYLQAQVRSRSK |
| | | LDAPKVDLLVKNCLLPLREYFKYFSQNSLPLGGPSSGAPPPSGGSPAG |
| | | SPTSTEEGTSESATPESGPGTSTEPSEGSAPGSPAGSPTSTEEGTSTEPS |
| | | EGSAPGTSTEPSEPKKKRKVYMDKKYSIGLAIGTNSVGWAVITDEYK |
| | | VPSKKFKVLGNTDRHSIKKNLIGALLFDSGETAEATRLKRTARRRYT |
| | | RRKNRICYLQEIFSNEMAKVDDSFFHRLEESFLVEEDKKHERHPIFGN |
| | | IVDEVAYHEKYPTIYHLRKKLVDSTDKADLRLIYLALAHMIKFRGHF |
| | | LIEGDLNPDNSDVDKLFIQLVQTYNQLFEENPINASGVDAKAILSARL |
| | | SKSRRLENLIAQLPGEKKNGLFGNLIALSLGLTPNFKSNFDLAEDAKL |
| | | QLSKDTYDDDLDNLLAQIGDQYADLFLAAKNLSDAILLSDILRVNTE |
| | | ITKAPLSASMIKRYDEHHQDLTLLKALVRQQLPEKYKEIFFDQSKNG |
| | | YAGYIDGGASQEEFYKFIKPILEKMDGTEELLVKLNREDLLRKQRTF |
| | | DNGSIPHQIHLGELHAILRRQEDFYPFLKDNREKIEKILTFRIPYYVGP |
| | | LARGNSRFAWMTRKSEETITPWNFEEVVDKGASAQSFIERMTNFDK |
| | | NLPNEKVLPKHSLLYEYFTVYNELTKVKYVTEGMRKPAFLSGEQKK |
| | | AIVDLLFKTNRKVTVKQLKEDYFKKIECFDSVEISGVEDRFNASLGT |
| | | YHDLLKIIKDKDFLDNEENEDILEDIVLTLTLFEDREMIEERLKTYAH |
| | | LFDDKVMKQLKRRRYTGWGRLSRKLINGIRDKQSGKTILDFLKSDG |
| | | FANRNFMQLIHDDSLTFKEDIQKAQVSGQGDSLHEHIANLAGSPAIK |
| | | KGILQTVKVVDELVKVMGRHKPENIVIEMARENQTTQKGQKNSRER |
| | | MKRIEEGIKELGSQILKEHPVENTQLQNEKLYLYYLQNGRDMYVDQ |
| | | ELDINRLSDYDVDAIVPQSFLKDDSIDNKVLTRSDKNRGKSDNVPSE |
| | | EVVKKMKNYWRQLLNAKLITQRKFDNLTKAERGGLSELDKAGFIKR |
| | | QLVETRQITKHVAQILDSRMNTKYDENDKLIREVKVITLKSKLVSDF |
| | | RKDFQFYKVREINNYHHAHDAYLNAVVGTALIKKYPKLESEFVYGD |
| | | YKVYDVRKMIAKSEQEIGKATAKYFFYSNIMNFFKTEITLANGEIRK |
| | | RPLIETNGETGEIVWDKGRDFATVRKVLSMPQVNIVKKTEVQTGGFS |
| | | KESILPKRNSDKLIARKKDWDPKKYGGFDSPTVAYSVLVVAKVEKG |
| | | KSKKLKSVKELLGITIMERSSFEKNPIDFLEAKGYKEVKKDLIIKLPKY |
| | | SLFELENGRKRMLASAGELQKGNELALPSKYVNFLYLASHYEKLKG |
| | | SPEDNEQKQLFVEQHKHYLDEIIEQISEFSKRVILADANLDKVLSAYN |
| | | KHRDKPIREQAENIIHLFTLTNLGAPAAFKYFDTTIDRKRYTSTKEVL |
| | | DATLIHQSITGLYETRIDLSQLGGDPKKKRKVSGSETPGTSESATPEST |
| | | GRTLVTFKDVFVDFTREEWKLLDTAQQIVYRNVMLENYKNLVSLG |
| | | YQLTKPDVILRLEKGEEPSTEPSEGSAPGTSTEPSETGPSEANSIQSAN |
| | | ATTKTSETNHTSRPRLKNVDRSTAQQLAVTVGNVTVIITDFKEKTRS |
| | | SSTSSSTVTSSAGSEQQNQSSS |
| 1005 | :DNMT3A/ | MNHDQEFDPPKVYPPVPAEKRKPIRVLSLFDGIATGLLVLKDLGIQV |
| | L- | DRYIASEVCEDSITVGMVRHQGKIMYVGDVRSVTQKHIQEWGPFDL |
| | dSpCas9- | VIGGSPCNDLSIVNPARKGLYEGTGRLFFEFYRLLHDARPKEGDDRPF |
| | XTEN16- | FWLFENVVAMGVSDKRDISRFLESNPVMIDAKEVSAAHRARYFWG |
| | KOX1KR | NLPGMNRPLASTVNDKLELQECLEHGRIAKFSKVRTITTRSNSIKQGK |
| | AB- | DQHFPVFMNEKEDILWCTEMERVFGFPVHYTDVSNMSRLARQRLLG |
| | CDYL2 | RSWSVPVIRHLFAPLKEYFACVSSGNSNANSRGPSFSSGLVPLSLRGS |
| | | HMGPMEIYKTVSAWKRQPVRVLSLFRNIDKVLKSLGFLESGSGSGG |
| | | GTLKYVEDVTNVVRRDVEKWGPFDLVYGSTQPLGSSCDRCPGWYM |
| | | FQFHRILQYALPRQESQRPFFWIFMDNLLLTEDDQETTTRFLQTEAVT |
| | | LQDVRGRDYQNAMRVWSNIPGLKSKHAPLTPKEEEYLQAQVRSRSK |
| | | LDAPKVDLLVKNCLLPLREYFKYFSQNSLPLGGPSSGAPPPSGGSPAG |
| | | SPTSTEEGTSESATPESGPGTSTEPSEGSAPGSPAGSPTSTEEGTSTEPS |
| | | EGSAPGTSTEPSEPKKKRKVYMDKKYSIGLAIGTNSVGWAVITDEYK |
| | | VPSKKFKVLGNTDRHSIKKNLIGALLFDSGETAEATRLKRTARRRYT |
| | | RRKNRICYLQEIFSNEMAKVDDSFFHRLEESFLVEEDKKHERHPIFGN |
| | | IVDEVAYHEKYPTIYHLRKKLVDSTDKADLRLIYLALAHMIKFRGHF |
| | | LIEGDLNPDNSDVDKLFIQLVQTYNQLFEENPINASGVDAKAILSARL |
| | | SKSRRLENLIAQLPGEKKNGLFGNLIALSLGLTPNFKSNFDLAEDAKL |
| | | QLSKDTYDDDLDNLLAQIGDQYADLFLAAKNLSDAILLSDILRVNTE |
| | | ITKAPLSASMIKRYDEHHQDLTLLKALVRQQLPEKYKEIFFDQSKNG |
| | | YAGYIDGGASQEEFYKFIKPILEKMDGTEELLVKLNREDLLRKQRTF |
| | | DNGSIPHQIHLGELHAILRRQEDFYPFLKDNREKIEKILTFRIPYYVGP |
| | | LARGNSRFAWMTRKSEETITPWNFEEVVDKGASAQSFIERMTNFDK |
| | | NLPNEKVLPKHSLLYEYFTVYNELTKVKYVTEGMRKPAFLSGEQKK |
| | | AIVDLLFKTNRKVTVKQLKEDYFKKIECFDSVEISGVEDRFNASLGT |
| | | YHDLLKIIKDKDFLDNEENEDILEDIVLTLTLFEDREMIEERLKTYAH |
| | | LFDDKVMKQLKRRRYTGWGRLSRKLINGIRDKQSGKTILDFLKSDG |
| | | FANRNFMQLIHDDSLTFKEDIQKAQVSGQGDSLHEHIANLAGSPAIK |
| | | KGILQTVKVVDELVKVMGRHKPENIVIEMARENQTTQKGQKNSRER |
| | | MKRIEEGIKELGSQILKEHPVENTQLQNEKLYLYYLQNGRDMYVDQ |
| | | ELDINRLSDYDVDAIVPQSFLKDDSIDNKVLTRSDKNRGKSDNVPSE |
| | | EVVKKMKNYWRQLLNAKLITQRKFDNLTKAERGGLSELDKAGFIKR |
| | | QLVETRQITKHVAQILDSRMNTKYDENDKLIREVKVITLKSKLVSDF |
| | | RKDFQFYKVREINNYHHAHDAYLNAVVGTALIKKYPKLESEFVYGD |
| | | YKVYDVRKMIAKSEQEIGKATAKYFFYSNIMNFFKTEITLANGEIRK |
| | | RPLIETNGETGEIVWDKGRDFATVRKVLSMPQVNIVKKTEVQTGGFS |
| | | KESILPKRNSDKLIARKKDWDPKKYGGFDSPTVAYSVLVVAKVEKG |
| | | KSKKLKSVKELLGITIMERSSFEKNPIDFLEAKGYKEVKKDLIIKLPKY |
| | | SLFELENGRKRMLASAGELQKGNELALPSKYVNFLYLASHYEKLKG |
| | | SPEDNEQKQLFVEQHKHYLDEIIEQISEFSKRVILADANLDKVLSAYN |
| | | KHRDKPIREQAENIIHLFTLTNLGAPAAFKYFDTTIDRKRYTSTKEVL |
| | | DATLIHQSITGLYETRIDLSQLGGDPKKKRKVSGSETPGTSESATPEST |
| | | GRTLVTFKDVFVDFTREEWKLLDTAQQIVYRNVMLENYKNLVSLG |
| | | YQLTKPDVILRLEKGEEPSTEPSEGSAPGTSTEPSETGASGDLYEVERI |
| | | VDKRKNKKGKWEYLIRWKGYGSTEDTWEPEHHLLHCEEFIDEFNGL |
| | | HMSKDKRIKSGKQSSTSKLLRDS |
| 1006 | :DNMT3A/ | MNHDQEFDPPKVYPPVPAEKRKPIRVLSLFDGIATGLLVLKDLGIQV |
| | L- | DRYIASEVCEDSITVGMVRHQGKIMYVGDVRSVTQKHIQEWGPFDL |
| | dSpCas9- | VIGGSPCNDLSIVNPARKGLYEGTGRLFFEFYRLLHDARPKEGDDRPF |
| | XTEN16- | FWLFENVVAMGVSDKRDISRFLESNPVMIDAKEVSAAHRARYFWG |
| | KOX1KR | NLPGMNRPLASTVNDKLELQECLEHGRIAKFSKVRTITTRSNSIKQGK |
| | AB-TOX | DQHFPVFMNEKEDILWCTEMERVFGFPVHYTDVSNMSRLARQRLLG |
| | | RSWSVPVIRHLFAPLKEYFACVSSGNSNANSRGPSFSSGLVPLSLRGS |
| | | HMGPMEIYKTVSAWKRQPVRVLSLFRNIDKVLKSLGFLESGSGSGG |
| | | GTLKYVEDVTNVVRRDVEKWGPFDLVYGSTQPLGSSCDRCPGWYM |
| | | FQFHRILQYALPRQESQRPFFWIFMDNLLLTEDDQETTTRFLQTEAVT |
| | | LQDVRGRDYQNAMRVWSNIPGLKSKHAPLTPKEEEYLQAQVRSRSK |
| | | LDAPKVDLLVKNCLLPLREYFKYFSQNSLPLGGPSSGAPPPSGGSPAG |
| | | SPTSTEEGTSESATPESGPGTSTEPSEGSAPGSPAGSPTSTEEGTSTEPS |
| | | EGSAPGTSTEPSEPKKKRKVYMDKKYSIGLAIGTNSVGWAVITDEYK |
| | | VPSKKFKVLGNTDRHSIKKNLIGALLFDSGETAEATRLKRTARRRYT |
| | | RRKNRICYLQEIFSNEMAKVDDSFFHRLEESFLVEEDKKHERHPIFGN |
| | | IVDEVAYHEKYPTIYHLRKKLVDSTDKADLRLIYLALAHMIKFRGHF |
| | | LIEGDLNPDNSDVDKLFIQLVQTYNQLFEENPINASGVDAKAILSARL |
| | | SKSRRLENLIAQLPGEKKNGLFGNLIALSLGLTPNFKSNFDLAEDAKL |
| | | QLSKDTYDDDLDNLLAQIGDQYADLFLAAKNLSDAILLSDILRVNTE |
| | | ITKAPLSASMIKRYDEHHQDLTLLKALVRQQLPEKYKEIFFDQSKNG |
| | | YAGYIDGGASQEEFYKFIKPILEKMDGTEELLVKLNREDLLRKQRTF |
| | | DNGSIPHQIHLGELHAILRRQEDFYPFLKDNREKIEKILTFRIPYYVGP |
| | | LARGNSRFAWMTRKSEETITPWNFEEVVDKGASAQSFIERMTNFDK |
| | | NLPNEKVLPKHSLLYEYFTVYNELTKVKYVTEGMRKPAFLSGEQKK |
| | | AIVDLLFKTNRKVTVKQLKEDYFKKIECFDSVEISGVEDRFNASLGT |
| | | YHDLLKIIKDKDFLDNEENEDILEDIVLTLTLFEDREMIEERLKTYAH |
| | | LFDDKVMKQLKRRRYTGWGRLSRKLINGIRDKQSGKTILDFLKSDG |
| | | FANRNFMQLIHDDSLTFKEDIQKAQVSGQGDSLHEHIANLAGSPAIK |
| | | KGILQTVKVVDELVKVMGRHKPENIVIEMARENQTTQKGQKNSRER |
| | | MKRIEEGIKELGSQILKEHPVENTQLQNEKLYLYYLQNGRDMYVDQ |
| | | ELDINRLSDYDVDAIVPQSFLKDDSIDNKVLTRSDKNRGKSDNVPSE |
| | | EVVKKMKNYWRQLLNAKLITQRKFDNLTKAERGGLSELDKAGFIKR |
| | | QLVETRQITKHVAQILDSRMNTKYDENDKLIREVKVITLKSKLVSDF |
| | | RKDFQFYKVREINNYHHAHDAYLNAVVGTALIKKYPKLESEFVYGD |
| | | YKVYDVRKMIAKSEQEIGKATAKYFFYSNIMNFFKTEITLANGEIRK |
| | | RPLIETNGETGEIVWDKGRDFATVRKVLSMPQVNIVKKTEVQTGGFS |
| | | KESILPKRNSDKLIARKKDWDPKKYGGFDSPTVAYSVLVVAKVEKG |
| | | KSKKLKSVKELLGITIMERSSFEKNPIDFLEAKGYKEVKKDLIIKLPKY |
| | | SLFELENGRKRMLASAGELQKGNELALPSKYVNFLYLASHYEKLKG |
| | | SPEDNEQKQLFVEQHKHYLDEIIEQISEFSKRVILADANLDKVLSAYN |
| | | KHRDKPIREQAENIIHLFTLTNLGAPAAFKYFDTTIDRKRYTSTKEVL |
| | | DATLIHQSITGLYETRIDLSQLGGDPKKKRKVSGSETPGTSESATPEST |
| | | GRTLVTFKDVFVDFTREEWKLLDTAQQIVYRNVMLENYKNLVSLG |
| | | YQLTKPDVILRLEKGEEPSTEPSEGSAPGTSTEPSETGKDPNEPQKPVS |
| | | AYALFFRDTQAAIKGQNPNATFGEVSKIVASMWDGLGEEQKQVYK |
| | | KKTEAAKKEYLKQLAAYRASLVSK |
| 1007 | :DNMT3A/ | MNHDQEFDPPKVYPPVPAEKRKPIRVLSLFDGIATGLLVLKDLGIQV |
| | L- | DRYIASEVCEDSITVGMVRHQGKIMYVGDVRSVTQKHIQEWGPFDL |
| | dSpCas9- | VIGGSPCNDLSIVNPARKGLYEGTGRLFFEFYRLLHDARPKEGDDRPF |
| | XTEN16- | FWLFENVVAMGVSDKRDISRFLESNPVMIDAKEVSAAHRARYFWG |
| | KOX1KR | NLPGMNRPLASTVNDKLELQECLEHGRIAKFSKVRTITTRSNSIKQGK |
| | AB- | DQHFPVFMNEKEDILWCTEMERVFGFPVHYTDVSNMSRLARQRLLG |
| | SCMH1 | RSWSVPVIRHLFAPLKEYFACVSSGNSNANSRGPSFSSGLVPLSLRGS |
| | | HMGPMEIYKTVSAWKRQPVRVLSLFRNIDKVLKSLGFLESGSGSGG |
| | | GTLKYVEDVTNVVRRDVEKWGPFDLVYGSTQPLGSSCDRCPGWYM |
| | | FQFHRILQYALPRQESQRPFFWIFMDNLLLTEDDQETTTRFLQTEAVT |
| | | LQDVRGRDYQNAMRVWSNIPGLKSKHAPLTPKEEEYLQAQVRSRSK |
| | | LDAPKVDLLVKNCLLPLREYFKYFSQNSLPLGGPSSGAPPPSGGSPAG |
| | | SPTSTEEGTSESATPESGPGTSTEPSEGSAPGSPAGSPTSTEEGTSTEPS |
| | | EGSAPGTSTEPSEPKKKRKVYMDKKYSIGLAIGTNSVGWAVITDEYK |
| | | VPSKKFKVLGNTDRHSIKKNLIGALLFDSGETAEATRLKRTARRRYT |
| | | RRKNRICYLQEIFSNEMAKVDDSFFHRLEESFLVEEDKKHERHPIFGN |
| | | IVDEVAYHEKYPTIYHLRKKLVDSTDKADLRLIYLALAHMIKFRGHF |
| | | LIEGDLNPDNSDVDKLFIQLVQTYNQLFEENPINASGVDAKAILSARL |
| | | SKSRRLENLIAQLPGEKKNGLFGNLIALSLGLTPNFKSNFDLAEDAKL |
| | | QLSKDTYDDDLDNLLAQIGDQYADLFLAAKNLSDAILLSDILRVNTE |
| | | ITKAPLSASMIKRYDEHHQDLTLLKALVRQQLPEKYKEIFFDQSKNG |
| | | YAGYIDGGASQEEFYKFIKPILEKMDGTEELLVKLNREDLLRKQRTF |
| | | DNGSIPHQIHLGELHAILRRQEDFYPFLKDNREKIEKILTFRIPYYVGP |
| | | LARGNSRFAWMTRKSEETITPWNFEEVVDKGASAQSFIERMTNFDK |
| | | NLPNEKVLPKHSLLYEYFTVYNELTKVKYVTEGMRKPAFLSGEQKK |
| | | AIVDLLFKTNRKVTVKQLKEDYFKKIECFDSVEISGVEDRFNASLGT |
| | | YHDLLKIIKDKDFLDNEENEDILEDIVLTLTLFEDREMIEERLKTYAH |
| | | LFDDKVMKQLKRRRYTGWGRLSRKLINGIRDKQSGKTILDFLKSDG |
| | | FANRNFMQLIHDDSLTFKEDIQKAQVSGQGDSLHEHIANLAGSPAIK |
| | | KGILQTVKVVDELVKVMGRHKPENIVIEMARENQTTQKGQKNSRER |
| | | MKRIEEGIKELGSQILKEHPVENTQLQNEKLYLYYLQNGRDMYVDQ |
| | | ELDINRLSDYDVDAIVPQSFLKDDSIDNKVLTRSDKNRGKSDNVPSE |
| | | EVVKKMKNYWRQLLNAKLITQRKFDNLTKAERGGLSELDKAGFIKR |
| | | QLVETRQITKHVAQILDSRMNTKYDENDKLIREVKVITLKSKLVSDF |
| | | RKDFQFYKVREINNYHHAHDAYLNAVVGTALIKKYPKLESEFVYGD |
| | | YKVYDVRKMIAKSEQEIGKATAKYFFYSNIMNFFKTEITLANGEIRK |
| | | RPLIETNGETGEIVWDKGRDFATVRKVLSMPQVNIVKKTEVQTGGFS |
| | | KESILPKRNSDKLIARKKDWDPKKYGGFDSPTVAYSVLVVAKVEKG |
| | | KSKKLKSVKELLGITIMERSSFEKNPIDFLEAKGYKEVKKDLIIKLPKY |
| | | SLFELENGRKRMLASAGELQKGNELALPSKYVNFLYLASHYEKLKG |
| | | SPEDNEQKQLFVEQHKHYLDEIIEQISEFSKRVILADANLDKVLSAYN |
| | | KHRDKPIREQAENIIHLFTLTNLGAPAAFKYFDTTIDRKRYTSTKEVL |
| | | DATLIHQSITGLYETRIDLSQLGGDPKKKRKVSGSETPGTSESATPEST |
| | | GRTLVTFKDVFVDFTREEWKLLDTAQQIVYRNVMLENYKNLVSLG |
| | | YQLTKPDVILRLEKGEEPSTEPSEGSAPGTSTEPSETGDASRLSGRDPS |
| | | SWTVEDVMQFVREADPQLGPHADLFRKHEIDGKALLLLRSDMMMK |
| | | YMGLKLGPALKLSYHIDRLKQGKF |
| 1008 | :DNMT3A/ | MNHDQEFDPPKVYPPVPAEKRKPIRVLSLFDGIATGLLVLKDLGIQV |
| | L- | DRYIASEVCEDSITVGMVRHQGKIMYVGDVRSVTQKHIQEWGPFDL |
| | dSpCas9- | VIGGSPCNDLSIVNPARKGLYEGTGRLFFEFYRLLHDARPKEGDDRPF |
| | XTEN16- | FWLFENVVAMGVSDKRDISRFLESNPVMIDAKEVSAAHRARYFWG |
| | KOX1KR | NLPGMNRPLASTVNDKLELQECLEHGRIAKFSKVRTITTRSNSIKQGK |
| | AB- | DQHFPVFMNEKEDILWCTEMERVFGFPVHYTDVSNMSRLARQRLLG |
| | SCML2 | RSWSVPVIRHLFAPLKEYFACVSSGNSNANSRGPSFSSGLVPLSLRGS |
| | | HMGPMEIYKTVSAWKRQPVRVLSLFRNIDKVLKSLGFLESGSGSGG |
| | | GTLKYVEDVTNVVRRDVEKWGPFDLVYGSTQPLGSSCDRCPGWYM |
| | | FQFHRILQYALPRQESQRPFFWIFMDNLLLTEDDQETTTRFLQTEAVT |
| | | LQDVRGRDYQNAMRVWSNIPGLKSKHAPLTPKEEEYLQAQVRSRSK |
| | | LDAPKVDLLVKNCLLPLREYFKYFSQNSLPLGGPSSGAPPPSGGSPAG |
| | | SPTSTEEGTSESATPESGPGTSTEPSEGSAPGSPAGSPTSTEEGTSTEPS |
| | | EGSAPGTSTEPSEPKKKRKVYMDKKYSIGLAIGTNSVGWAVITDEYK |
| | | VPSKKFKVLGNTDRHSIKKNLIGALLFDSGETAEATRLKRTARRRYT |
| | | RRKNRICYLQEIFSNEMAKVDDSFFHRLEESFLVEEDKKHERHPIFGN |
| | | IVDEVAYHEKYPTIYHLRKKLVDSTDKADLRLIYLALAHMIKFRGHF |
| | | LIEGDLNPDNSDVDKLFIQLVQTYNQLFEENPINASGVDAKAILSARL |
| | | SKSRRLENLIAQLPGEKKNGLFGNLIALSLGLTPNFKSNFDLAEDAKL |
| | | QLSKDTYDDDLDNLLAQIGDQYADLFLAAKNLSDAILLSDILRVNTE |
| | | ITKAPLSASMIKRYDEHHQDLTLLKALVRQQLPEKYKEIFFDQSKNG |
| | | YAGYIDGGASQEEFYKFIKPILEKMDGTEELLVKLNREDLLRKQRTF |
| | | DNGSIPHQIHLGELHAILRRQEDFYPFLKDNREKIEKILTFRIPYYVGP |
| | | LARGNSRFAWMTRKSEETITPWNFEEVVDKGASAQSFIERMTNFDK |
| | | NLPNEKVLPKHSLLYEYFTVYNELTKVKYVTEGMRKPAFLSGEQKK |
| | | AIVDLLFKTNRKVTVKQLKEDYFKKIECFDSVEISGVEDRFNASLGT |
| | | YHDLLKIIKDKDFLDNEENEDILEDIVLTLTLFEDREMIEERLKTYAH |
| | | LFDDKVMKQLKRRRYTGWGRLSRKLINGIRDKQSGKTILDFLKSDG |
| | | FANRNFMQLIHDDSLTFKEDIQKAQVSGQGDSLHEHIANLAGSPAIK |
| | | KGILQTVKVVDELVKVMGRHKPENIVIEMARENQTTQKGQKNSRER |
| | | MKRIEEGIKELGSQILKEHPVENTQLQNEKLYLYYLQNGRDMYVDQ |
| | | ELDINRLSDYDVDAIVPQSFLKDDSIDNKVLTRSDKNRGKSDNVPSE |
| | | EVVKKMKNYWRQLLNAKLITQRKFDNLTKAERGGLSELDKAGFIKR |
| | | QLVETRQITKHVAQILDSRMNTKYDENDKLIREVKVITLKSKLVSDF |
| | | RKDFQFYKVREINNYHHAHDAYLNAVVGTALIKKYPKLESEFVYGD |
| | | YKVYDVRKMIAKSEQEIGKATAKYFFYSNIMNFFKTEITLANGEIRK |
| | | RPLIETNGETGEIVWDKGRDFATVRKVLSMPQVNIVKKTEVQTGGFS |
| | | KESILPKRNSDKLIARKKDWDPKKYGGFDSPTVAYSVLVVAKVEKG |
| | | KSKKLKSVKELLGITIMERSSFEKNPIDFLEAKGYKEVKKDLIIKLPKY |
| | | SLFELENGRKRMLASAGELQKGNELALPSKYVNFLYLASHYEKLKG |
| | | SPEDNEQKQLFVEQHKHYLDEIIEQISEFSKRVILADANLDKVLSAYN |
| | | KHRDKPIREQAENIIHLFTLTNLGAPAAFKYFDTTIDRKRYTSTKEVL |
| | | DATLIHQSITGLYETRIDLSQLGGDPKKKRKVSGSETPGTSESATPEST |
| | | GRTLVTFKDVFVDFTREEWKLLDTAQQIVYRNVMLENYKNLVSLG |
| | | YQLTKPDVILRLEKGEEPSTEPSEGSAPGTSTEPSETGKQGFSKDPST |
| | | WSVDEVIQFMKHTDPQISGPLADLFRQHEIDGKALFLLKSDVMMKY |
| | | MGLKLGPALKLCYYIEKLKEGKYS |
| 1009 | :DNMT3A/ | MNHDQEFDPPKVYPPVPAEKRKPIRVLSLFDGIATGLLVLKDLGIQV |
| | L- | DRYIASEVCEDSITVGMVRHQGKIMYVGDVRSVTQKHIQEWGPFDL |
| | dSpCas9- | VIGGSPCNDLSIVNPARKGLYEGTGRLFFEFYRLLHDARPKEGDDRPF |
| | XTEN16- | FWLFENVVAMGVSDKRDISRFLESNPVMIDAKEVSAAHRARYFWG |
| | KOX1KR | NLPGMNRPLASTVNDKLELQECLEHGRIAKFSKVRTITTRSNSIKQGK |
| | AB-CBX8 | DQHFPVFMNEKEDILWCTEMERVFGFPVHYTDVSNMSRLARQRLLG |
| | | RSWSVPVIRHLFAPLKEYFACVSSGNSNANSRGPSFSSGLVPLSLRGS |
| | | HMGPMEIYKTVSAWKRQPVRVLSLFRNIDKVLKSLGFLESGSGSGG |
| | | GTLKYVEDVTNVVRRDVEKWGPFDLVYGSTQPLGSSCDRCPGWYM |
| | | FQFHRILQYALPRQESQRPFFWIFMDNLLLTEDDQETTTRFLQTEAVT |
| | | LQDVRGRDYQNAMRVWSNIPGLKSKHAPLTPKEEEYLQAQVRSRSK |
| | | LDAPKVDLLVKNCLLPLREYFKYFSQNSLPLGGPSSGAPPPSGGSPAG |
| | | SPTSTEEGTSESATPESGPGTSTEPSEGSAPGSPAGSPTSTEEGTSTEPS |
| | | EGSAPGTSTEPSEPKKKRKVYMDKKYSIGLAIGTNSVGWAVITDEYK |
| | | VPSKKFKVLGNTDRHSIKKNLIGALLFDSGETAEATRLKRTARRRYT |
| | | RRKNRICYLQEIFSNEMAKVDDSFFHRLEESFLVEEDKKHERHPIFGN |
| | | IVDEVAYHEKYPTIYHLRKKLVDSTDKADLRLIYLALAHMIKFRGHF |
| | | LIEGDLNPDNSDVDKLFIQLVQTYNQLFEENPINASGVDAKAILSARL |
| | | SKSRRLENLIAQLPGEKKNGLFGNLIALSLGLTPNFKSNFDLAEDAKL |
| | | QLSKDTYDDDLDNLLAQIGDQYADLFLAAKNLSDAILLSDILRVNTE |
| | | ITKAPLSASMIKRYDEHHQDLTLLKALVRQQLPEKYKEIFFDQSKNG |
| | | YAGYIDGGASQEEFYKFIKPILEKMDGTEELLVKLNREDLLRKQRTF |
| | | DNGSIPHQIHLGELHAILRRQEDFYPFLKDNREKIEKILTFRIPYYVGP |
| | | LARGNSRFAWMTRKSEETITPWNFEEVVDKGASAQSFIERMTNFDK |
| | | NLPNEKVLPKHSLLYEYFTVYNELTKVKYVTEGMRKPAFLSGEQKK |
| | | AIVDLLFKTNRKVTVKQLKEDYFKKIECFDSVEISGVEDRFNASLGT |
| | | YHDLLKIIKDKDFLDNEENEDILEDIVLTLTLFEDREMIEERLKTYAH |
| | | LFDDKVMKQLKRRRYTGWGRLSRKLINGIRDKQSGKTILDFLKSDG |
| | | FANRNFMQLIHDDSLTFKEDIQKAQVSGQGDSLHEHIANLAGSPAIK |
| | | KGILQTVKVVDELVKVMGRHKPENIVIEMARENQTTQKGQKNSRER |
| | | MKRIEEGIKELGSQILKEHPVENTQLQNEKLYLYYLQNGRDMYVDQ |
| | | ELDINRLSDYDVDAIVPQSFLKDDSIDNKVLTRSDKNRGKSDNVPSE |
| | | EVVKKMKNYWRQLLNAKLITQRKFDNLTKAERGGLSELDKAGFIKR |
| | | QLVETRQITKHVAQILDSRMNTKYDENDKLIREVKVITLKSKLVSDF |
| | | RKDFQFYKVREINNYHHAHDAYLNAVVGTALIKKYPKLESEFVYGD |
| | | YKVYDVRKMIAKSEQEIGKATAKYFFYSNIMNFFKTEITLANGEIRK |
| | | RPLIETNGETGEIVWDKGRDFATVRKVLSMPQVNIVKKTEVQTGGFS |
| | | KESILPKRNSDKLIARKKDWDPKKYGGFDSPTVAYSVLVVAKVEKG |
| | | KSKKLKSVKELLGITIMERSSFEKNPIDFLEAKGYKEVKKDLIIKLPKY |
| | | SLFELENGRKRMLASAGELQKGNELALPSKYVNFLYLASHYEKLKG |
| | | SPEDNEQKQLFVEQHKHYLDEIIEQISEFSKRVILADANLDKVLSAYN |
| | | KHRDKPIREQAENIIHLFTLTNLGAPAAFKYFDTTIDRKRYTSTKEVL |
| | | DATLIHQSITGLYETRIDLSQLGGDPKKKRKVSGSETPGTSESATPEST |
| | | GRTLVTFKDVFVDFTREEWKLLDTAQQIVYRNVMLENYKNLVSLG |
| | | YQLTKPDVILRLEKGEEPSTEPSEGSAPGTSTEPSETGGSGPPSSGGGL |
| | | YRDMGAQGGRPSLIARIPVARILGDPEEESWSPSLTNLEKVVVTDVT |
| | | SNFLTVTIKESNTDQGFFKEKR |
| 1010 | :DNMT3A/ | MNHDQEFDPPKVYPPVPAEKRKPIRVLSLFDGIATGLLVLKDLGIQV |
| | L- | DRYIASEVCEDSITVGMVRHQGKIMYVGDVRSVTQKHIQEWGPFDL |
| | dSpCas9- | VIGGSPCNDLSIVNPARKGLYEGTGRLFFEFYRLLHDARPKEGDDRPF |
| | XTEN16- | FWLFENVVAMGVSDKRDISRFLESNPVMIDAKEVSAAHRARYFWG |
| | KOX1KR | NLPGMNRPLASTVNDKLELQECLEHGRIAKFSKVRTITTRSNSIKQGK |
| | AB-TOX3 | DQHFPVFMNEKEDILWCTEMERVFGFPVHYTDVSNMSRLARQRLLG |
| | | RSWSVPVIRHLFAPLKEYFACVSSGNSNANSRGPSFSSGLVPLSLRGS |
| | | HMGPMEIYKTVSAWKRQPVRVLSLFRNIDKVLKSLGFLESGSGSGG |
| | | GTLKYVEDVTNVVRRDVEKWGPFDLVYGSTQPLGSSCDRCPGWYM |
| | | FQFHRILQYALPRQESQRPFFWIFMDNLLLTEDDQETTTRFLQTEAVT |
| | | LQDVRGRDYQNAMRVWSNIPGLKSKHAPLTPKEEEYLQAQVRSRSK |
| | | LDAPKVDLLVKNCLLPLREYFKYFSQNSLPLGGPSSGAPPPSGGSPAG |
| | | SPTSTEEGTSESATPESGPGTSTEPSEGSAPGSPAGSPTSTEEGTSTEPS |
| | | EGSAPGTSTEPSEPKKKRKVYMDKKYSIGLAIGTNSVGWAVITDEYK |
| | | VPSKKFKVLGNTDRHSIKKNLIGALLFDSGETAEATRLKRTARRRYT |
| | | RRKNRICYLQEIFSNEMAKVDDSFFHRLEESFLVEEDKKHERHPIFGN |
| | | IVDEVAYHEKYPTIYHLRKKLVDSTDKADLRLIYLALAHMIKFRGHF |
| | | LIEGDLNPDNSDVDKLFIQLVQTYNQLFEENPINASGVDAKAILSARL |
| | | SKSRRLENLIAQLPGEKKNGLFGNLIALSLGLTPNFKSNFDLAEDAKL |
| | | QLSKDTYDDDLDNLLAQIGDQYADLFLAAKNLSDAILLSDILRVNTE |
| | | ITKAPLSASMIKRYDEHHQDLTLLKALVRQQLPEKYKEIFFDQSKNG |
| | | YAGYIDGGASQEEFYKFIKPILEKMDGTEELLVKLNREDLLRKQRTF |
| | | DNGSIPHQIHLGELHAILRRQEDFYPFLKDNREKIEKILTFRIPYYVGP |
| | | LARGNSRFAWMTRKSEETITPWNFEEVVDKGASAQSFIERMTNFDK |
| | | NLPNEKVLPKHSLLYEYFTVYNELTKVKYVTEGMRKPAFLSGEQKK |
| | | AIVDLLFKTNRKVTVKQLKEDYFKKIECFDSVEISGVEDRFNASLGT |
| | | YHDLLKIIKDKDFLDNEENEDILEDIVLTLTLFEDREMIEERLKTYAH |
| | | LFDDKVMKQLKRRRYTGWGRLSRKLINGIRDKQSGKTILDFLKSDG |
| | | FANRNFMQLIHDDSLTFKEDIQKAQVSGQGDSLHEHIANLAGSPAIK |
| | | KGILQTVKVVDELVKVMGRHKPENIVIEMARENQTTQKGQKNSRER |
| | | MKRIEEGIKELGSQILKEHPVENTQLQNEKLYLYYLQNGRDMYVDQ |
| | | ELDINRLSDYDVDAIVPQSFLKDDSIDNKVLTRSDKNRGKSDNVPSE |
| | | EVVKKMKNYWRQLLNAKLITQRKFDNLTKAERGGLSELDKAGFIKR |
| | | QLVETRQITKHVAQILDSRMNTKYDENDKLIREVKVITLKSKLVSDF |
| | | RKDFQFYKVREINNYHHAHDAYLNAVVGTALIKKYPKLESEFVYGD |
| | | YKVYDVRKMIAKSEQEIGKATAKYFFYSNIMNFFKTEITLANGEIRK |
| | | RPLIETNGETGEIVWDKGRDFATVRKVLSMPQVNIVKKTEVQTGGFS |
| | | KESILPKRNSDKLIARKKDWDPKKYGGFDSPTVAYSVLVVAKVEKG |
| | | KSKKLKSVKELLGITIMERSSFEKNPIDFLEAKGYKEVKKDLIIKLPKY |
| | | SLFELENGRKRMLASAGELQKGNELALPSKYVNFLYLASHYEKLKG |
| | | SPEDNEQKQLFVEQHKHYLDEIIEQISEFSKRVILADANLDKVLSAYN |
| | | KHRDKPIREQAENIIHLFTLTNLGAPAAFKYFDTTIDRKRYTSTKEVL |
| | | DATLIHQSITGLYETRIDLSQLGGDPKKKRKVSGSETPGTSESATPEST |
| | | GRTLVTFKDVFVDFTREEWKLLDTAQQIVYRNVMLENYKNLVSLG |
| | | YQLTKPDVILRLEKGEEPSTEPSEGSAPGTSTEPSETGKDPNEPQKPVS |
| | | AYALFFRDTQAAIKGQNPNATFGEVSKIVASMWDSLGEEQKQVYKR |
| | | KTEAAKKEYLKALAAYRASLVSK |
| 1011 | :DNMT3A/ | MNHDQEFDPPKVYPPVPAEKRKPIRVLSLFDGIATGLLVLKDLGIQV |
| | L- | DRYIASEVCEDSITVGMVRHQGKIMYVGDVRSVTQKHIQEWGPFDL |
| | dSpCas9- | VIGGSPCNDLSIVNPARKGLYEGTGRLFFEFYRLLHDARPKEGDDRPF |
| | XTEN16- | FWLFENVVAMGVSDKRDISRFLESNPVMIDAKEVSAAHRARYFWG |
| | KOX1KR | NLPGMNRPLASTVNDKLELQECLEHGRIAKFSKVRTITTRSNSIKQGK |
| | AB-TOX4 | DQHFPVFMNEKEDILWCTEMERVFGFPVHYTDVSNMSRLARQRLLG |
| | | RSWSVPVIRHLFAPLKEYFACVSSGNSNANSRGPSFSSGLVPLSLRGS |
| | | HMGPMEIYKTVSAWKRQPVRVLSLFRNIDKVLKSLGFLESGSGSGG |
| | | GTLKYVEDVTNVVRRDVEKWGPFDLVYGSTQPLGSSCDRCPGWYM |
| | | FQFHRILQYALPRQESQRPFFWIFMDNLLLTEDDQETTTRFLQTEAVT |
| | | LQDVRGRDYQNAMRVWSNIPGLKSKHAPLTPKEEEYLQAQVRSRSK |
| | | LDAPKVDLLVKNCLLPLREYFKYFSQNSLPLGGPSSGAPPPSGGSPAG |
| | | SPTSTEEGTSESATPESGPGTSTEPSEGSAPGSPAGSPTSTEEGTSTEPS |
| | | EGSAPGTSTEPSEPKKKRKVYMDKKYSIGLAIGTNSVGWAVITDEYK |
| | | VPSKKFKVLGNTDRHSIKKNLIGALLFDSGETAEATRLKRTARRRYT |
| | | RRKNRICYLQEIFSNEMAKVDDSFFHRLEESFLVEEDKKHERHPIFGN |
| | | IVDEVAYHEKYPTIYHLRKKLVDSTDKADLRLIYLALAHMIKFRGHF |
| | | LIEGDLNPDNSDVDKLFIQLVQTYNQLFEENPINASGVDAKAILSARL |
| | | SKSRRLENLIAQLPGEKKNGLFGNLIALSLGLTPNFKSNFDLAEDAKL |
| | | QLSKDTYDDDLDNLLAQIGDQYADLFLAAKNLSDAILLSDILRVNTE |
| | | ITKAPLSASMIKRYDEHHQDLTLLKALVRQQLPEKYKEIFFDQSKNG |
| | | YAGYIDGGASQEEFYKFIKPILEKMDGTEELLVKLNREDLLRKQRTF |
| | | DNGSIPHQIHLGELHAILRRQEDFYPFLKDNREKIEKILTFRIPYYVGP |
| | | LARGNSRFAWMTRKSEETITPWNFEEVVDKGASAQSFIERMTNFDK |
| | | NLPNEKVLPKHSLLYEYFTVYNELTKVKYVTEGMRKPAFLSGEQKK |
| | | AIVDLLFKTNRKVTVKQLKEDYFKKIECFDSVEISGVEDRFNASLGT |
| | | YHDLLKIIKDKDFLDNEENEDILEDIVLTLTLFEDREMIEERLKTYAH |
| | | LFDDKVMKQLKRRRYTGWGRLSRKLINGIRDKQSGKTILDFLKSDG |
| | | FANRNFMQLIHDDSLTFKEDIQKAQVSGQGDSLHEHIANLAGSPAIK |
| | | KGILQTVKVVDELVKVMGRHKPENIVIEMARENQTTQKGQKNSRER |
| | | MKRIEEGIKELGSQILKEHPVENTQLQNEKLYLYYLQNGRDMYVDQ |
| | | ELDINRLSDYDVDAIVPQSFLKDDSIDNKVLTRSDKNRGKSDNVPSE |
| | | EVVKKMKNYWRQLLNAKLITQRKFDNLTKAERGGLSELDKAGFIKR |
| | | QLVETRQITKHVAQILDSRMNTKYDENDKLIREVKVITLKSKLVSDF |
| | | RKDFQFYKVREINNYHHAHDAYLNAVVGTALIKKYPKLESEFVYGD |
| | | YKVYDVRKMIAKSEQEIGKATAKYFFYSNIMNFFKTEITLANGEIRK |
| | | RPLIETNGETGEIVWDKGRDFATVRKVLSMPQVNIVKKTEVQTGGFS |
| | | KESILPKRNSDKLIARKKDWDPKKYGGFDSPTVAYSVLVVAKVEKG |
| | | KSKKLKSVKELLGITIMERSSFEKNPIDFLEAKGYKEVKKDLIIKLPKY |
| | | SLFELENGRKRMLASAGELQKGNELALPSKYVNFLYLASHYEKLKG |
| | | SPEDNEQKQLFVEQHKHYLDEIIEQISEFSKRVILADANLDKVLSAYN |
| | | KHRDKPIREQAENIIHLFTLTNLGAPAAFKYFDTTIDRKRYTSTKEVL |
| | | DATLIHQSITGLYETRIDLSQLGGDPKKKRKVSGSETPGTSESATPEST |
| | | GRTLVTFKDVFVDFTREEWKLLDTAQQIVYRNVMLENYKNLVSLG |
| | | YQLTKPDVILRLEKGEEPSTEPSEGSAPGTSTEPSETGKDPNEPQKPVS |
| | | AYALFFRDTQAAIKGQNPNATFGEVSKIVASMWDSLGEEQKQVYKR |
| | | KTEAAKKEYLKALAAYKDNQECQ |
| 1012 | :DNMT3A/ | MNHDQEFDPPKVYPPVPAEKRKPIRVLSLFDGIATGLLVLKDLGIQV |
| | L- | DRYIASEVCEDSITVGMVRHQGKIMYVGDVRSVTQKHIQEWGPFDL |
| | dSpCas9- | VIGGSPCNDLSIVNPARKGLYEGTGRLFFEFYRLLHDARPKEGDDRPF |
| | XTEN16- | FWLFENVVAMGVSDKRDISRFLESNPVMIDAKEVSAAHRARYFWG |
| | KOX1KR | NLPGMNRPLASTVNDKLELQECLEHGRIAKFSKVRTITTRSNSIKQGK |
| | AB-I2BP1 | DQHFPVFMNEKEDILWCTEMERVFGFPVHYTDVSNMSRLARQRLLG |
| | | RSWSVPVIRHLFAPLKEYFACVSSGNSNANSRGPSFSSGLVPLSLRGS |
| | | HMGPMEIYKTVSAWKRQPVRVLSLFRNIDKVLKSLGFLESGSGSGG |
| | | GTLKYVEDVTNVVRRDVEKWGPFDLVYGSTQPLGSSCDRCPGWYM |
| | | FQFHRILQYALPRQESQRPFFWIFMDNLLLTEDDQETTTRFLQTEAVT |
| | | LQDVRGRDYQNAMRVWSNIPGLKSKHAPLTPKEEEYLQAQVRSRSK |
| | | LDAPKVDLLVKNCLLPLREYFKYFSQNSLPLGGPSSGAPPPSGGSPAG |
| | | SPTSTEEGTSESATPESGPGTSTEPSEGSAPGSPAGSPTSTEEGTSTEPS |
| | | EGSAPGTSTEPSEPKKKRKVYMDKKYSIGLAIGTNSVGWAVITDEYK |
| | | VPSKKFKVLGNTDRHSIKKNLIGALLFDSGETAEATRLKRTARRRYT |
| | | RRKNRICYLQEIFSNEMAKVDDSFFHRLEESFLVEEDKKHERHPIFGN |
| | | IVDEVAYHEKYPTIYHLRKKLVDSTDKADLRLIYLALAHMIKFRGHF |
| | | LIEGDLNPDNSDVDKLFIQLVQTYNQLFEENPINASGVDAKAILSARL |
| | | SKSRRLENLIAQLPGEKKNGLFGNLIALSLGLTPNFKSNFDLAEDAKL |
| | | QLSKDTYDDDLDNLLAQIGDQYADLFLAAKNLSDAILLSDILRVNTE |
| | | ITKAPLSASMIKRYDEHHQDLTLLKALVRQQLPEKYKEIFFDQSKNG |
| | | YAGYIDGGASQEEFYKFIKPILEKMDGTEELLVKLNREDLLRKQRTF |
| | | DNGSIPHQIHLGELHAILRRQEDFYPFLKDNREKIEKILTFRIPYYVGP |
| | | LARGNSRFAWMTRKSEETITPWNFEEVVDKGASAQSFIERMTNFDK |
| | | NLPNEKVLPKHSLLYEYFTVYNELTKVKYVTEGMRKPAFLSGEQKK |
| | | AIVDLLFKTNRKVTVKQLKEDYFKKIECFDSVEISGVEDRFNASLGT |
| | | YHDLLKIIKDKDFLDNEENEDILEDIVLTLTLFEDREMIEERLKTYAH |
| | | LFDDKVMKQLKRRRYTGWGRLSRKLINGIRDKQSGKTILDFLKSDG |
| | | FANRNFMQLIHDDSLTFKEDIQKAQVSGQGDSLHEHIANLAGSPAIK |
| | | KGILQTVKVVDELVKVMGRHKPENIVIEMARENQTTQKGQKNSRER |
| | | MKRIEEGIKELGSQILKEHPVENTQLQNEKLYLYYLQNGRDMYVDQ |
| | | ELDINRLSDYDVDAIVPQSFLKDDSIDNKVLTRSDKNRGKSDNVPSE |
| | | EVVKKMKNYWRQLLNAKLITQRKFDNLTKAERGGLSELDKAGFIKR |
| | | QLVETRQITKHVAQILDSRMNTKYDENDKLIREVKVITLKSKLVSDF |
| | | RKDFQFYKVREINNYHHAHDAYLNAVVGTALIKKYPKLESEFVYGD |
| | | YKVYDVRKMIAKSEQEIGKATAKYFFYSNIMNFFKTEITLANGEIRK |
| | | RPLIETNGETGEIVWDKGRDFATVRKVLSMPQVNIVKKTEVQTGGFS |
| | | KESILPKRNSDKLIARKKDWDPKKYGGFDSPTVAYSVLVVAKVEKG |
| | | KSKKLKSVKELLGITIMERSSFEKNPIDFLEAKGYKEVKKDLIIKLPKY |
| | | SLFELENGRKRMLASAGELQKGNELALPSKYVNFLYLASHYEKLKG |
| | | SPEDNEQKQLFVEQHKHYLDEIIEQISEFSKRVILADANLDKVLSAYN |
| | | KHRDKPIREQAENIIHLFTLTNLGAPAAFKYFDTTIDRKRYTSTKEVL |
| | | DATLIHQSITGLYETRIDLSQLGGDPKKKRKVSGSETPGTSESATPEST |
| | | GRTLVTFKDVFVDFTREEWKLLDTAQQIVYRNVMLENYKNLVSLG |
| | | YQLTKPDVILRLEKGEEPSTEPSEGSAPGTSTEPSETGASVQASRRQW |
| | | CYLCDLPKMPWAMVWDFSEAVCRGCVNFEGADRIELLIDAARQLK |
| | | RSHVLPEGRSPGPPALKHPATKDLA |
| 1013 | :DNMT3A/ | MNHDQEFDPPKVYPPVPAEKRKPIRVLSLFDGIATGLLVLKDLGIQV |
| | L- | DRYIASEVCEDSITVGMVRHQGKIMYVGDVRSVTQKHIQEWGPFDL |
| | dSpCas9- | VIGGSPCNDLSIVNPARKGLYEGTGRLFFEFYRLLHDARPKEGDDRPF |
| | XTEN16- | FWLFENVVAMGVSDKRDISRFLESNPVMIDAKEVSAAHRARYFWG |
| | KOX1KR | NLPGMNRPLASTVNDKLELQECLEHGRIAKFSKVRTITTRSNSIKQGK |
| | AB-MBD2 | DQHFPVFMNEKEDILWCTEMERVFGFPVHYTDVSNMSRLARQRLLG |
| | | RSWSVPVIRHLFAPLKEYFACVSSGNSNANSRGPSFSSGLVPLSLRGS |
| | | HMGPMEIYKTVSAWKRQPVRVLSLFRNIDKVLKSLGFLESGSGSGG |
| | | GTLKYVEDVTNVVRRDVEKWGPFDLVYGSTQPLGSSCDRCPGWYM |
| | | FQFHRILQYALPRQESQRPFFWIFMDNLLLTEDDQETTTRFLQTEAVT |
| | | LQDVRGRDYQNAMRVWSNIPGLKSKHAPLTPKEEEYLQAQVRSRSK |
| | | LDAPKVDLLVKNCLLPLREYFKYFSQNSLPLGGPSSGAPPPSGGSPAG |
| | | SPTSTEEGTSESATPESGPGTSTEPSEGSAPGSPAGSPTSTEEGTSTEPS |
| | | EGSAPGTSTEPSEPKKKRKVYMDKKYSIGLAIGTNSVGWAVITDEYK |
| | | VPSKKFKVLGNTDRHSIKKNLIGALLFDSGETAEATRLKRTARRRYT |
| | | RRKNRICYLQEIFSNEMAKVDDSFFHRLEESFLVEEDKKHERHPIFGN |
| | | IVDEVAYHEKYPTIYHLRKKLVDSTDKADLRLIYLALAHMIKFRGHF |
| | | LIEGDLNPDNSDVDKLFIQLVQTYNQLFEENPINASGVDAKAILSARL |
| | | SKSRRLENLIAQLPGEKKNGLFGNLIALSLGLTPNFKSNFDLAEDAKL |
| | | QLSKDTYDDDLDNLLAQIGDQYADLFLAAKNLSDAILLSDILRVNTE |
| | | ITKAPLSASMIKRYDEHHQDLTLLKALVRQQLPEKYKEIFFDQSKNG |
| | | YAGYIDGGASQEEFYKFIKPILEKMDGTEELLVKLNREDLLRKQRTF |
| | | DNGSIPHQIHLGELHAILRRQEDFYPFLKDNREKIEKILTFRIPYYVGP |
| | | LARGNSRFAWMTRKSEETITPWNFEEVVDKGASAQSFIERMTNFDK |
| | | NLPNEKVLPKHSLLYEYFTVYNELTKVKYVTEGMRKPAFLSGEQKK |
| | | AIVDLLFKTNRKVTVKQLKEDYFKKIECFDSVEISGVEDRFNASLGT |
| | | YHDLLKIIKDKDFLDNEENEDILEDIVLTLTLFEDREMIEERLKTYAH |
| | | LFDDKVMKQLKRRRYTGWGRLSRKLINGIRDKQSGKTILDFLKSDG |
| | | FANRNFMQLIHDDSLTFKEDIQKAQVSGQGDSLHEHIANLAGSPAIK |
| | | KGILQTVKVVDELVKVMGRHKPENIVIEMARENQTTQKGQKNSRER |
| | | MKRIEEGIKELGSQILKEHPVENTQLQNEKLYLYYLQNGRDMYVDQ |
| | | ELDINRLSDYDVDAIVPQSFLKDDSIDNKVLTRSDKNRGKSDNVPSE |
| | | EVVKKMKNYWRQLLNAKLITQRKFDNLTKAERGGLSELDKAGFIKR |
| | | QLVETRQITKHVAQILDSRMNTKYDENDKLIREVKVITLKSKLVSDF |
| | | RKDFQFYKVREINNYHHAHDAYLNAVVGTALIKKYPKLESEFVYGD |
| | | YKVYDVRKMIAKSEQEIGKATAKYFFYSNIMNFFKTEITLANGEIRK |
| | | RPLIETNGETGEIVWDKGRDFATVRKVLSMPQVNIVKKTEVQTGGFS |
| | | KESILPKRNSDKLIARKKDWDPKKYGGFDSPTVAYSVLVVAKVEKG |
| | | KSKKLKSVKELLGITIMERSSFEKNPIDFLEAKGYKEVKKDLIIKLPKY |
| | | SLFELENGRKRMLASAGELQKGNELALPSKYVNFLYLASHYEKLKG |
| | | SPEDNEQKQLFVEQHKHYLDEIIEQISEFSKRVILADANLDKVLSAYN |
| | | KHRDKPIREQAENIIHLFTLTNLGAPAAFKYFDTTIDRKRYTSTKEVL |
| | | DATLIHQSITGLYETRIDLSQLGGDPKKKRKVSGSETPGTSESATPEST |
| | | GRTLVTFKDVFVDFTREEWKLLDTAQQIVYRNVMLENYKNLVSLG |
| | | YQLTKPDVILRLEKGEEPSTEPSEGSAPGTSTEPSETGMRAHPGGGRC |
| | | CPEQEEGESAAGGSGAGGDSAIEQGGQGSALAPSPVSGVRREGARG |
| | | GGRGRGRWKQAGRGGGVCGRGRGRGRGRGRGRGRGRGRGRPPSG |
| | | GSGLGGDGGGCGGGGSGGGGAPRREPVPFPSGSAGPGPRGPRATES |
| | | GKRMDCPALPPGWKKEEVIRKSGLSAGKSDVYYFSPSGKKFRSKPQ |
| | | LARYLGNTVDLSSFDFRTGKMMPSKLQKNKQRLRNDPLNQNKGKP |
| | | DLNTTLPIRQTASIFKQPVTKVTNHPSNKVKSDPQRMNEQPRQLFWE |
| | | KRLQGLSASDVTEQIIKTMELPKGLQGVGPGSNDETLLSAVASALHT |
| | | SSAPITGQVSAAVEKNPAVWLNTSQPLCKAFIVTDEDIRKQEERVQQ |
| | | VRKKLEEALMADILSRAADTEEMDIEMDSGDEA |
| 1014 | :DNMT3A/ | MNHDQEFDPPKVYPPVPAEKRKPIRVLSLFDGIATGLLVLKDLGIQV |
| | L- | DRYIASEVCEDSITVGMVRHQGKIMYVGDVRSVTQKHIQEWGPFDL |
| | dSpCas9- | VIGGSPCNDLSIVNPARKGLYEGTGRLFFEFYRLLHDARPKEGDDRPF |
| | XTEN16- | FWLFENVVAMGVSDKRDISRFLESNPVMIDAKEVSAAHRARYFWG |
| | KOX1KR | NLPGMNRPLASTVNDKLELQECLEHGRIAKFSKVRTITTRSNSIKQGK |
| | AB- | DQHFPVFMNEKEDILWCTEMERVFGFPVHYTDVSNMSRLARQRLLG |
| | MeCP2 | RSWSVPVIRHLFAPLKEYFACVSSGNSNANSRGPSFSSGLVPLSLRGS |
| | | HMGPMEIYKTVSAWKRQPVRVLSLFRNIDKVLKSLGFLESGSGSGG |
| | | GTLKYVEDVTNVVRRDVEKWGPFDLVYGSTQPLGSSCDRCPGWYM |
| | | FQFHRILQYALPRQESQRPFFWIFMDNLLLTEDDQETTTRFLQTEAVT |
| | | LQDVRGRDYQNAMRVWSNIPGLKSKHAPLTPKEEEYLQAQVRSRSK |
| | | LDAPKVDLLVKNCLLPLREYFKYFSQNSLPLGGPSSGAPPPSGGSPAG |
| | | SPTSTEEGTSESATPESGPGTSTEPSEGSAPGSPAGSPTSTEEGTSTEPS |
| | | EGSAPGTSTEPSEPKKKRKVYMDKKYSIGLAIGTNSVGWAVITDEYK |
| | | VPSKKFKVLGNTDRHSIKKNLIGALLFDSGETAEATRLKRTARRRYT |
| | | RRKNRICYLQEIFSNEMAKVDDSFFHRLEESFLVEEDKKHERHPIFGN |
| | | IVDEVAYHEKYPTIYHLRKKLVDSTDKADLRLIYLALAHMIKFRGHF |
| | | LIEGDLNPDNSDVDKLFIQLVQTYNQLFEENPINASGVDAKAILSARL |
| | | SKSRRLENLIAQLPGEKKNGLFGNLIALSLGLTPNFKSNFDLAEDAKL |
| | | QLSKDTYDDDLDNLLAQIGDQYADLFLAAKNLSDAILLSDILRVNTE |
| | | ITKAPLSASMIKRYDEHHQDLTLLKALVRQQLPEKYKEIFFDQSKNG |
| | | YAGYIDGGASQEEFYKFIKPILEKMDGTEELLVKLNREDLLRKQRTF |
| | | DNGSIPHQIHLGELHAILRRQEDFYPFLKDNREKIEKILTFRIPYYVGP |
| | | LARGNSRFAWMTRKSEETITPWNFEEVVDKGASAQSFIERMTNFDK |
| | | NLPNEKVLPKHSLLYEYFTVYNELTKVKYVTEGMRKPAFLSGEQKK |
| | | AIVDLLFKTNRKVTVKQLKEDYFKKIECFDSVEISGVEDRFNASLGT |
| | | YHDLLKIIKDKDFLDNEENEDILEDIVLTLTLFEDREMIEERLKTYAH |
| | | LFDDKVMKQLKRRRYTGWGRLSRKLINGIRDKQSGKTILDFLKSDG |
| | | FANRNFMQLIHDDSLTFKEDIQKAQVSGQGDSLHEHIANLAGSPAIK |
| | | KGILQTVKVVDELVKVMGRHKPENIVIEMARENQTTQKGQKNSRER |
| | | MKRIEEGIKELGSQILKEHPVENTQLQNEKLYLYYLQNGRDMYVDQ |
| | | ELDINRLSDYDVDAIVPQSFLKDDSIDNKVLTRSDKNRGKSDNVPSE |
| | | EVVKKMKNYWRQLLNAKLITQRKFDNLTKAERGGLSELDKAGFIKR |
| | | QLVETRQITKHVAQILDSRMNTKYDENDKLIREVKVITLKSKLVSDF |
| | | RKDFQFYKVREINNYHHAHDAYLNAVVGTALIKKYPKLESEFVYGD |
| | | YKVYDVRKMIAKSEQEIGKATAKYFFYSNIMNFFKTEITLANGEIRK |
| | | RPLIETNGETGEIVWDKGRDFATVRKVLSMPQVNIVKKTEVQTGGFS |
| | | KESILPKRNSDKLIARKKDWDPKKYGGFDSPTVAYSVLVVAKVEKG |
| | | KSKKLKSVKELLGITIMERSSFEKNPIDFLEAKGYKEVKKDLIIKLPKY |
| | | SLFELENGRKRMLASAGELQKGNELALPSKYVNFLYLASHYEKLKG |
| | | SPEDNEQKQLFVEQHKHYLDEIIEQISEFSKRVILADANLDKVLSAYN |
| | | KHRDKPIREQAENIIHLFTLTNLGAPAAFKYFDTTIDRKRYTSTKEVL |
| | | DATLIHQSITGLYETRIDLSQLGGDPKKKRKVSGSETPGTSESATPEST |
| | | GRTLVTFKDVFVDFTREEWKLLDTAQQIVYRNVMLENYKNLVSLG |
| | | YQLTKPDVILRLEKGEEPSTEPSEGSAPGTSTEPSETGMVAGMLGLRE |
| | | EKSEDQDLQGLKDKPLKFKKVKKDKKEEKEGKHEPVQPSAHHSAEP |
| | | AEAGKAETSEGSGSAPAVPEASASPKQRRSIIRDRGPMYDDPTLPEG |
| | | WTRKLKQRKSGRSAGKYDVYLINPQGKAFRSKVELIAYFEKVGDTS |
| | | LDPNDFDFTVTGRGSPSRREQKPPKKPKSPKAPGTGRGRGRPKGSGT |
| | | TRPKAATSEGVQVKRVLEKSPGKLLVKMPFQTSPGGKAEGGGATTS |
| | | TQVMVIKRPGRKRKAEADPQAIPKKRGRKPGSVVAAAAAEAKKKA |
| | | VKESSIRSVQETVLPIKKRKTRETVSIEVKEVVKPLLVSTLGEKSGKG |
| | | LKTCKSPGRKSKESSPKGRSSSASSPPKKEHHHHHHHSESPKAPVPLL |
| | | PPLPPPPPEPESSEDPTSPPEPQDLSSSVCKEEKMPRGGSLESDGCPKE |
| | | PAKTQPAVATAATAAEKYKHRGEGERKDIVSSSMPRPNREEPVDSR |
| | | TPVTERVS |
| 1015 | :DNMT3A/ | MNHDQEFDPPKVYPPVPAEKRKPIRVLSLFDGIATGLLVLKDLGIQV |
| | L- | DRYIASEVCEDSITVGMVRHQGKIMYVGDVRSVTQKHIQEWGPFDL |
| | dSpCas9- | VIGGSPCNDLSIVNPARKGLYEGTGRLFFEFYRLLHDARPKEGDDRPF |
| | XTEN16- | FWLFENVVAMGVSDKRDISRFLESNPVMIDAKEVSAAHRARYFWG |
| | KOX1KR | NLPGMNRPLASTVNDKLELQECLEHGRIAKFSKVRTITTRSNSIKQGK |
| | AB-Kap1 | DQHFPVFMNEKEDILWCTEMERVFGFPVHYTDVSNMSRLARQRLLG |
| | | RSWSVPVIRHLFAPLKEYFACVSSGNSNANSRGPSFSSGLVPLSLRGS |
| | | HMGPMEIYKTVSAWKRQPVRVLSLFRNIDKVLKSLGFLESGSGSGG |
| | | GTLKYVEDVTNVVRRDVEKWGPFDLVYGSTQPLGSSCDRCPGWYM |
| | | FQFHRILQYALPRQESQRPFFWIFMDNLLLTEDDQETTTRFLQTEAVT |
| | | LQDVRGRDYQNAMRVWSNIPGLKSKHAPLTPKEEEYLQAQVRSRSK |
| | | LDAPKVDLLVKNCLLPLREYFKYFSQNSLPLGGPSSGAPPPSGGSPAG |
| | | SPTSTEEGTSESATPESGPGTSTEPSEGSAPGSPAGSPTSTEEGTSTEPS |
| | | EGSAPGTSTEPSEPKKKRKVYMDKKYSIGLAIGTNSVGWAVITDEYK |
| | | VPSKKFKVLGNTDRHSIKKNLIGALLFDSGETAEATRLKRTARRRYT |
| | | RRKNRICYLQEIFSNEMAKVDDSFFHRLEESFLVEEDKKHERHPIFGN |
| | | IVDEVAYHEKYPTIYHLRKKLVDSTDKADLRLIYLALAHMIKFRGHF |
| | | LIEGDLNPDNSDVDKLFIQLVQTYNQLFEENPINASGVDAKAILSARL |
| | | SKSRRLENLIAQLPGEKKNGLFGNLIALSLGLTPNFKSNFDLAEDAKL |
| | | QLSKDTYDDDLDNLLAQIGDQYADLFLAAKNLSDAILLSDILRVNTE |
| | | ITKAPLSASMIKRYDEHHQDLTLLKALVRQQLPEKYKEIFFDQSKNG |
| | | YAGYIDGGASQEEFYKFIKPILEKMDGTEELLVKLNREDLLRKQRTF |
| | | DNGSIPHQIHLGELHAILRRQEDFYPFLKDNREKIEKILTFRIPYYVGP |
| | | LARGNSRFAWMTRKSEETITPWNFEEVVDKGASAQSFIERMTNFDK |
| | | NLPNEKVLPKHSLLYEYFTVYNELTKVKYVTEGMRKPAFLSGEQKK |
| | | AIVDLLFKTNRKVTVKQLKEDYFKKIECFDSVEISGVEDRFNASLGT |
| | | YHDLLKIIKDKDFLDNEENEDILEDIVLTLTLFEDREMIEERLKTYAH |
| | | LFDDKVMKQLKRRRYTGWGRLSRKLINGIRDKQSGKTILDFLKSDG |
| | | FANRNFMQLIHDDSLTFKEDIQKAQVSGQGDSLHEHIANLAGSPAIK |
| | | KGILQTVKVVDELVKVMGRHKPENIVIEMARENQTTQKGQKNSRER |
| | | MKRIEEGIKELGSQILKEHPVENTQLQNEKLYLYYLQNGRDMYVDQ |
| | | ELDINRLSDYDVDAIVPQSFLKDDSIDNKVLTRSDKNRGKSDNVPSE |
| | | EVVKKMKNYWRQLLNAKLITQRKFDNLTKAERGGLSELDKAGFIKR |
| | | QLVETRQITKHVAQILDSRMNTKYDENDKLIREVKVITLKSKLVSDF |
| | | RKDFQFYKVREINNYHHAHDAYLNAVVGTALIKKYPKLESEFVYGD |
| | | YKVYDVRKMIAKSEQEIGKATAKYFFYSNIMNFFKTEITLANGEIRK |
| | | RPLIETNGETGEIVWDKGRDFATVRKVLSMPQVNIVKKTEVQTGGFS |
| | | KESILPKRNSDKLIARKKDWDPKKYGGFDSPTVAYSVLVVAKVEKG |
| | | KSKKLKSVKELLGITIMERSSFEKNPIDFLEAKGYKEVKKDLIIKLPKY |
| | | SLFELENGRKRMLASAGELQKGNELALPSKYVNFLYLASHYEKLKG |
| | | SPEDNEQKQLFVEQHKHYLDEIIEQISEFSKRVILADANLDKVLSAYN |
| | | KHRDKPIREQAENIIHLFTLTNLGAPAAFKYFDTTIDRKRYTSTKEVL |
| | | DATLIHQSITGLYETRIDLSQLGGDPKKKRKVSGSETPGTSESATPEST |
| | | GRTLVTFKDVFVDFTREEWKLLDTAQQIVYRNVMLENYKNLVSLG |
| | | YQLTKPDVILRLEKGEEPSTEPSEGSAPGTSTEPSETGMAASAAAASA |
| | | AAASAASGSPGPGEGSAGGEKRSTAPSAAASASASAAASSPAGGGA |
| | | EALELLEHCGVCRERLRPEREPRLLPCLHSACSACLGPAAPAAANSS |
| | | GDGGAAGDGTVVDCPVCKQQCFSKDIVENYFMRDSGSKAATDAQD |
| | | ANQCCTSCEDNAPATSYCVECSEPLCETCVEAHQRVKYTKDHTVRS |
| | | TGPAKSRDGERTVYCNVHKHEPLVLFCESCDTLTCRDCQLNAHKDH |
| | | QYQFLEDAVRNQRKLLASLVKRLGDKHATLQKSTKEVRSSIRQVSD |
| | | VQKRVQVDVKMAILQIMKELNKRGRVLVNDAQKVTEGQQERLERQ |
| | | HWTMTKIQKHQEHILRFASWALESDNNTALLLSKKLIYFQLHRALK |
| | | MIVDPVEPHGEMKFQWDLNAWTKSAEAFGKIVAERPGTNSTGPAP |
| | | MAPPRAPGPLSKQGSGSSQPMEVQEGYGFGSGDDPYSSAEPHVSGV |
| | | KRSRSGEGEVSGLMRKVPRVSLERLDLDLTADSQPPVFKVFPGSTTE |
| | | DYNLIVIERGAAAAATGQPGTAPAGTPGAPPLAGMAIVKEEETEAAI |
| | | GAPPTATEGPETKPVLMALAEGPGAEGPRLASPSGSTSSGLEVVAPE |
| | | GTSAPGGGPGTLDDSATICRVCQKPGDLVMCNQCEFCFHLDCHLPA |
| | | LQDVPGEEWSCSLCHVLPDLKEEDGSLSLDGADSTGVVAKLSPANQ |
| | | RKCERVLLALFCHEPCRPLHQLATDSTFSLDQPGGTLDLTLIRARLQE |
| | | KLSPPYSSPQEFAQDVGRMFKQFNKLTEDKADVQSIIGLQRFFETRM |
| | | NEAFGDTKFSAVLVEPPPMSLPGAGLSSQELSGGPGDGP |
| 1016 | :DNMT3A/ | MNHDQEFDPPKVYPPVPAEKRKPIRVLSLFDGIATGLLVLKDLGIQV |
| | L- | DRYIASEVCEDSITVGMVRHQGKIMYVGDVRSVTQKHIQEWGPFDL |
| | dSpCas9- | VIGGSPCNDLSIVNPARKGLYEGTGRLFFEFYRLLHDARPKEGDDRPF |
| | XTEN16- | FWLFENVVAMGVSDKRDISRFLESNPVMIDAKEVSAAHRARYFWG |
| | KOX1KR | NLPGMNRPLASTVNDKLELQECLEHGRIAKFSKVRTITTRSNSIKQGK |
| | AB-HP1a | DQHFPVFMNEKEDILWCTEMERVFGFPVHYTDVSNMSRLARQRLLG |
| | | RSWSVPVIRHLFAPLKEYFACVSSGNSNANSRGPSFSSGLVPLSLRGS |
| | | HMGPMEIYKTVSAWKRQPVRVLSLFRNIDKVLKSLGFLESGSGSGG |
| | | GTLKYVEDVTNVVRRDVEKWGPFDLVYGSTQPLGSSCDRCPGWYM |
| | | FQFHRILQYALPRQESQRPFFWIFMDNLLLTEDDQETTTRFLQTEAVT |
| | | LQDVRGRDYQNAMRVWSNIPGLKSKHAPLTPKEEEYLQAQVRSRSK |
| | | LDAPKVDLLVKNCLLPLREYFKYFSQNSLPLGGPSSGAPPPSGGSPAG |
| | | SPTSTEEGTSESATPESGPGTSTEPSEGSAPGSPAGSPTSTEEGTSTEPS |
| | | EGSAPGTSTEPSEPKKKRKVYMDKKYSIGLAIGTNSVGWAVITDEYK |
| | | VPSKKFKVLGNTDRHSIKKNLIGALLFDSGETAEATRLKRTARRRYT |
| | | RRKNRICYLQEIFSNEMAKVDDSFFHRLEESFLVEEDKKHERHPIFGN |
| | | IVDEVAYHEKYPTIYHLRKKLVDSTDKADLRLIYLALAHMIKFRGHF |
| | | LIEGDLNPDNSDVDKLFIQLVQTYNQLFEENPINASGVDAKAILSARL |
| | | SKSRRLENLIAQLPGEKKNGLFGNLIALSLGLTPNFKSNFDLAEDAKL |
| | | QLSKDTYDDDLDNLLAQIGDQYADLFLAAKNLSDAILLSDILRVNTE |
| | | ITKAPLSASMIKRYDEHHQDLTLLKALVRQQLPEKYKEIFFDQSKNG |
| | | YAGYIDGGASQEEFYKFIKPILEKMDGTEELLVKLNREDLLRKQRTF |
| | | DNGSIPHQIHLGELHAILRRQEDFYPFLKDNREKIEKILTFRIPYYVGP |
| | | LARGNSRFAWMTRKSEETITPWNFEEVVDKGASAQSFIERMTNFDK |
| | | NLPNEKVLPKHSLLYEYFTVYNELTKVKYVTEGMRKPAFLSGEQKK |
| | | AIVDLLFKTNRKVTVKQLKEDYFKKIECFDSVEISGVEDRFNASLGT |
| | | YHDLLKIIKDKDFLDNEENEDILEDIVLTLTLFEDREMIEERLKTYAH |
| | | LFDDKVMKQLKRRRYTGWGRLSRKLINGIRDKQSGKTILDFLKSDG |
| | | FANRNFMQLIHDDSLTFKEDIQKAQVSGQGDSLHEHIANLAGSPAIK |
| | | KGILQTVKVVDELVKVMGRHKPENIVIEMARENQTTQKGQKNSRER |
| | | MKRIEEGIKELGSQILKEHPVENTQLQNEKLYLYYLQNGRDMYVDQ |
| | | ELDINRLSDYDVDAIVPQSFLKDDSIDNKVLTRSDKNRGKSDNVPSE |
| | | EVVKKMKNYWRQLLNAKLITQRKFDNLTKAERGGLSELDKAGFIKR |
| | | QLVETRQITKHVAQILDSRMNTKYDENDKLIREVKVITLKSKLVSDF |
| | | RKDFQFYKVREINNYHHAHDAYLNAVVGTALIKKYPKLESEFVYGD |
| | | YKVYDVRKMIAKSEQEIGKATAKYFFYSNIMNFFKTEITLANGEIRK |
| | | RPLIETNGETGEIVWDKGRDFATVRKVLSMPQVNIVKKTEVQTGGFS |
| | | KESILPKRNSDKLIARKKDWDPKKYGGFDSPTVAYSVLVVAKVEKG |
| | | KSKKLKSVKELLGITIMERSSFEKNPIDFLEAKGYKEVKKDLIIKLPKY |
| | | SLFELENGRKRMLASAGELQKGNELALPSKYVNFLYLASHYEKLKG |
| | | SPEDNEQKQLFVEQHKHYLDEIIEQISEFSKRVILADANLDKVLSAYN |
| | | KHRDKPIREQAENIIHLFTLTNLGAPAAFKYFDTTIDRKRYTSTKEVL |
| | | DATLIHQSITGLYETRIDLSQLGGDPKKKRKVSGSETPGTSESATPEST |
| | | GRTLVTFKDVFVDFTREEWKLLDTAQQIVYRNVMLENYKNLVSLG |
| | | YQLTKPDVILRLEKGEEPSTEPSEGSAPGTSTEPSETGMGKKTKRTAD |
| | | SSSSEDEEEYVVEKVLDRRVVKGQVEYLLKWKGFSEEHNTWEPEKN |
| | | LDCPELISEFMKKYKKMKEGENNKPREKSESNKRKSNFSNSADDIKS |
| | | KKKREQSNDIARGFERGLEPEKIIGATDSCGDLMFLMKWKGTDEAD |
| | | LVLAKEANVKCPQIVIAFYEERLTWHAYPEDAENKEKETAKS |
| 1017 | :DNMT3A/ | MNHDQEFDPPKVYPPVPAEKRKPIRVLSLFDGIATGLLVLKDLGIQV |
| | L- | DRYIASEVCEDSITVGMVRHQGKIMYVGDVRSVTQKHIQEWGPFDL |
| | dSpCas9- | VIGGSPCNDLSIVNPARKGLYEGTGRLFFEFYRLLHDARPKEGDDRPF |
| | XTEN16- | FWLFENVVAMGVSDKRDISRFLESNPVMIDAKEVSAAHRARYFWG |
| | KOX1KR | NLPGMNRPLASTVNDKLELQECLEHGRIAKFSKVRTITTRSNSIKQGK |
| | AB-HP1b | DQHFPVFMNEKEDILWCTEMERVFGFPVHYTDVSNMSRLARQRLLG |
| | | RSWSVPVIRHLFAPLKEYFACVSSGNSNANSRGPSFSSGLVPLSLRGS |
| | | HMGPMEIYKTVSAWKRQPVRVLSLFRNIDKVLKSLGFLESGSGSGG |
| | | GTLKYVEDVTNVVRRDVEKWGPFDLVYGSTQPLGSSCDRCPGWYM |
| | | FQFHRILQYALPRQESQRPFFWIFMDNLLLTEDDQETTTRFLQTEAVT |
| | | LQDVRGRDYQNAMRVWSNIPGLKSKHAPLTPKEEEYLQAQVRSRSK |
| | | LDAPKVDLLVKNCLLPLREYFKYFSQNSLPLGGPSSGAPPPSGGSPAG |
| | | SPTSTEEGTSESATPESGPGTSTEPSEGSAPGSPAGSPTSTEEGTSTEPS |
| | | EGSAPGTSTEPSEPKKKRKVYMDKKYSIGLAIGTNSVGWAVITDEYK |
| | | VPSKKFKVLGNTDRHSIKKNLIGALLFDSGETAEATRLKRTARRRYT |
| | | RRKNRICYLQEIFSNEMAKVDDSFFHRLEESFLVEEDKKHERHPIFGN |
| | | IVDEVAYHEKYPTIYHLRKKLVDSTDKADLRLIYLALAHMIKFRGHF |
| | | LIEGDLNPDNSDVDKLFIQLVQTYNQLFEENPINASGVDAKAILSARL |
| | | SKSRRLENLIAQLPGEKKNGLFGNLIALSLGLTPNFKSNFDLAEDAKL |
| | | QLSKDTYDDDLDNLLAQIGDQYADLFLAAKNLSDAILLSDILRVNTE |
| | | ITKAPLSASMIKRYDEHHQDLTLLKALVRQQLPEKYKEIFFDQSKNG |
| | | YAGYIDGGASQEEFYKFIKPILEKMDGTEELLVKLNREDLLRKQRTF |
| | | DNGSIPHQIHLGELHAILRRQEDFYPFLKDNREKIEKILTFRIPYYVGP |
| | | LARGNSRFAWMTRKSEETITPWNFEEVVDKGASAQSFIERMTNFDK |
| | | NLPNEKVLPKHSLLYEYFTVYNELTKVKYVTEGMRKPAFLSGEQKK |
| | | AIVDLLFKTNRKVTVKQLKEDYFKKIECFDSVEISGVEDRFNASLGT |
| | | YHDLLKIIKDKDFLDNEENEDILEDIVLTLTLFEDREMIEERLKTYAH |
| | | LFDDKVMKQLKRRRYTGWGRLSRKLINGIRDKQSGKTILDFLKSDG |
| | | FANRNFMQLIHDDSLTFKEDIQKAQVSGQGDSLHEHIANLAGSPAIK |
| | | KGILQTVKVVDELVKVMGRHKPENIVIEMARENQTTQKGQKNSRER |
| | | MKRIEEGIKELGSQILKEHPVENTQLQNEKLYLYYLQNGRDMYVDQ |
| | | ELDINRLSDYDVDAIVPQSFLKDDSIDNKVLTRSDKNRGKSDNVPSE |
| | | EVVKKMKNYWRQLLNAKLITQRKFDNLTKAERGGLSELDKAGFIKR |
| | | QLVETRQITKHVAQILDSRMNTKYDENDKLIREVKVITLKSKLVSDF |
| | | RKDFQFYKVREINNYHHAHDAYLNAVVGTALIKKYPKLESEFVYGD |
| | | YKVYDVRKMIAKSEQEIGKATAKYFFYSNIMNFFKTEITLANGEIRK |
| | | RPLIETNGETGEIVWDKGRDFATVRKVLSMPQVNIVKKTEVQTGGFS |
| | | KESILPKRNSDKLIARKKDWDPKKYGGFDSPTVAYSVLVVAKVEKG |
| | | KSKKLKSVKELLGITIMERSSFEKNPIDFLEAKGYKEVKKDLIIKLPKY |
| | | SLFELENGRKRMLASAGELQKGNELALPSKYVNFLYLASHYEKLKG |
| | | SPEDNEQKQLFVEQHKHYLDEIIEQISEFSKRVILADANLDKVLSAYN |
| | | KHRDKPIREQAENIIHLFTLTNLGAPAAFKYFDTTIDRKRYTSTKEVL |
| | | DATLIHQSITGLYETRIDLSQLGGDPKKKRKVSGSETPGTSESATPEST |
| | | GRTLVTFKDVFVDFTREEWKLLDTAQQIVYRNVMLENYKNLVSLG |
| | | YQLTKPDVILRLEKGEEPSTEPSEGSAPGTSTEPSETGMGKKQNKKK |
| | | VEEVLEEEEEEYVVEKVLDRRVVKGKVEYLLKWKGFSDEDNTWEP |
| | | EENLDCPDLIAEFLQSQKTAHETDKSEGGKRKADSDSEDKGEESKPK |
| | | KKKEESEKPRGFARGLEPERIIGATDSSGELMFLMKWKNSDEADLVP |
| | | AKEANVKCPQVVISFYEERLTWHSYPSEDDDKKDDKN |
| 1018 | :DNMT3A/ | MNHDQEFDPPKVYPPVPAEKRKPIRVLSLFDGIATGLLVLKDLGIQV |
| | L- | DRYIASEVCEDSITVGMVRHQGKIMYVGDVRSVTQKHIQEWGPFDL |
| | dSpCas9- | VIGGSPCNDLSIVNPARKGLYEGTGRLFFEFYRLLHDARPKEGDDRPF |
| | XTEN16- | FWLFENVVAMGVSDKRDISRFLESNPVMIDAKEVSAAHRARYFWG |
| | KOX1KR | NLPGMNRPLASTVNDKLELQECLEHGRIAKFSKVRTITTRSNSIKQGK |
| | AB-EED | DQHFPVFMNEKEDILWCTEMERVFGFPVHYTDVSNMSRLARQRLLG |
| | | RSWSVPVIRHLFAPLKEYFACVSSGNSNANSRGPSFSSGLVPLSLRGS |
| | | HMGPMEIYKTVSAWKRQPVRVLSLFRNIDKVLKSLGFLESGSGSGG |
| | | GTLKYVEDVTNVVRRDVEKWGPFDLVYGSTQPLGSSCDRCPGWYM |
| | | FQFHRILQYALPRQESQRPFFWIFMDNLLLTEDDQETTTRFLQTEAVT |
| | | LQDVRGRDYQNAMRVWSNIPGLKSKHAPLTPKEEEYLQAQVRSRSK |
| | | LDAPKVDLLVKNCLLPLREYFKYFSQNSLPLGGPSSGAPPPSGGSPAG |
| | | SPTSTEEGTSESATPESGPGTSTEPSEGSAPGSPAGSPTSTEEGTSTEPS |
| | | EGSAPGTSTEPSEPKKKRKVYMDKKYSIGLAIGTNSVGWAVITDEYK |
| | | VPSKKFKVLGNTDRHSIKKNLIGALLFDSGETAEATRLKRTARRRYT |
| | | RRKNRICYLQEIFSNEMAKVDDSFFHRLEESFLVEEDKKHERHPIFGN |
| | | IVDEVAYHEKYPTIYHLRKKLVDSTDKADLRLIYLALAHMIKFRGHF |
| | | LIEGDLNPDNSDVDKLFIQLVQTYNQLFEENPINASGVDAKAILSARL |
| | | SKSRRLENLIAQLPGEKKNGLFGNLIALSLGLTPNFKSNFDLAEDAKL |
| | | QLSKDTYDDDLDNLLAQIGDQYADLFLAAKNLSDAILLSDILRVNTE |
| | | ITKAPLSASMIKRYDEHHQDLTLLKALVRQQLPEKYKEIFFDQSKNG |
| | | YAGYIDGGASQEEFYKFIKPILEKMDGTEELLVKLNREDLLRKQRTF |
| | | DNGSIPHQIHLGELHAILRRQEDFYPFLKDNREKIEKILTFRIPYYVGP |
| | | LARGNSRFAWMTRKSEETITPWNFEEVVDKGASAQSFIERMTNFDK |
| | | NLPNEKVLPKHSLLYEYFTVYNELTKVKYVTEGMRKPAFLSGEQKK |
| | | AIVDLLFKTNRKVTVKQLKEDYFKKIECFDSVEISGVEDRFNASLGT |
| | | YHDLLKIIKDKDFLDNEENEDILEDIVLTLTLFEDREMIEERLKTYAH |
| | | LFDDKVMKQLKRRRYTGWGRLSRKLINGIRDKQSGKTILDFLKSDG |
| | | FANRNFMQLIHDDSLTFKEDIQKAQVSGQGDSLHEHIANLAGSPAIK |
| | | KGILQTVKVVDELVKVMGRHKPENIVIEMARENQTTQKGQKNSRER |
| | | MKRIEEGIKELGSQILKEHPVENTQLQNEKLYLYYLQNGRDMYVDQ |
| | | ELDINRLSDYDVDAIVPQSFLKDDSIDNKVLTRSDKNRGKSDNVPSE |
| | | EVVKKMKNYWRQLLNAKLITQRKFDNLTKAERGGLSELDKAGFIKR |
| | | QLVETRQITKHVAQILDSRMNTKYDENDKLIREVKVITLKSKLVSDF |
| | | RKDFQFYKVREINNYHHAHDAYLNAVVGTALIKKYPKLESEFVYGD |
| | | YKVYDVRKMIAKSEQEIGKATAKYFFYSNIMNFFKTEITLANGEIRK |
| | | RPLIETNGETGEIVWDKGRDFATVRKVLSMPQVNIVKKTEVQTGGFS |
| | | KESILPKRNSDKLIARKKDWDPKKYGGFDSPTVAYSVLVVAKVEKG |
| | | KSKKLKSVKELLGITIMERSSFEKNPIDFLEAKGYKEVKKDLIIKLPKY |
| | | SLFELENGRKRMLASAGELQKGNELALPSKYVNFLYLASHYEKLKG |
| | | SPEDNEQKQLFVEQHKHYLDEIIEQISEFSKRVILADANLDKVLSAYN |
| | | KHRDKPIREQAENIIHLFTLTNLGAPAAFKYFDTTIDRKRYTSTKEVL |
| | | DATLIHQSITGLYETRIDLSQLGGDPKKKRKVSGSETPGTSESATPEST |
| | | GRTLVTFKDVFVDFTREEWKLLDTAQQIVYRNVMLENYKNLVSLG |
| | | YQLTKPDVILRLEKGEEPSTEPSEGSAPGTSTEPSETGMSEREVSTAPA |
| | | GTDMPAAKKQKLSSDENSNPDLSGDENDDAVSIESGTNTERPDTPTN |
| | | TPNAPGRKSWGKGKWKSKKCKYSFKCVNSLKEDHNQPLFGVQFNW |
| | | HSKEGDPLVFATVGSNRVTLYECHSQGEIRLLQSYVDADADENFYT |
| | | CAWTYDSNTSHPLLAVAGSRGIIRIINPITMQCIKHYVGHGNAINELK |
| | | FHPRDPNLLLSVSKDHALRLWNIQTDTLVAIFGGVEGHRDEVLSADY |
| | | DLLGEKIMSCGMDHSLKLWRINSKRMMNAIKESYDYNPNKTNRPFI |
| | | SQKIHFPDFSTRDIHRNYVDCVRWLGDLILSKSCENAIVCWKPGKME |
| | | DDIDKIKPSESNVTILGRFDYSQCDIWYMRFSMDFWQKMLALGNQV |
| | | GKLYVWDLEVEDPHKAKCTTLTHHKCGAAIRQTSFSRDSSILIAVCD |
| | | DASIWRWDRLR |
| 1019 | :DNMT3A/ | MNHDQEFDPPKVYPPVPAEKRKPIRVLSLFDGIATGLLVLKDLGIQV |
| | L- | DRYIASEVCEDSITVGMVRHQGKIMYVGDVRSVTQKHIQEWGPFDL |
| | dSpCas9- | VIGGSPCNDLSIVNPARKGLYEGTGRLFFEFYRLLHDARPKEGDDRPF |
| | XTEN16- | FWLFENVVAMGVSDKRDISRFLESNPVMIDAKEVSAAHRARYFWG |
| | KOX1KR | NLPGMNRPLASTVNDKLELQECLEHGRIAKFSKVRTITTRSNSIKQGK |
| | AB- | DQHFPVFMNEKEDILWCTEMERVFGFPVHYTDVSNMSRLARQRLLG |
| | RBBP4 | RSWSVPVIRHLFAPLKEYFACVSSGNSNANSRGPSFSSGLVPLSLRGS |
| | | HMGPMEIYKTVSAWKRQPVRVLSLFRNIDKVLKSLGFLESGSGSGG |
| | | GTLKYVEDVTNVVRRDVEKWGPFDLVYGSTQPLGSSCDRCPGWYM |
| | | FQFHRILQYALPRQESQRPFFWIFMDNLLLTEDDQETTTRFLQTEAVT |
| | | LQDVRGRDYQNAMRVWSNIPGLKSKHAPLTPKEEEYLQAQVRSRSK |
| | | LDAPKVDLLVKNCLLPLREYFKYFSQNSLPLGGPSSGAPPPSGGSPAG |
| | | SPTSTEEGTSESATPESGPGTSTEPSEGSAPGSPAGSPTSTEEGTSTEPS |
| | | EGSAPGTSTEPSEPKKKRKVYMDKKYSIGLAIGTNSVGWAVITDEYK |
| | | VPSKKFKVLGNTDRHSIKKNLIGALLFDSGETAEATRLKRTARRRYT |
| | | RRKNRICYLQEIFSNEMAKVDDSFFHRLEESFLVEEDKKHERHPIFGN |
| | | IVDEVAYHEKYPTIYHLRKKLVDSTDKADLRLIYLALAHMIKFRGHF |
| | | LIEGDLNPDNSDVDKLFIQLVQTYNQLFEENPINASGVDAKAILSARL |
| | | SKSRRLENLIAQLPGEKKNGLFGNLIALSLGLTPNFKSNFDLAEDAKL |
| | | QLSKDTYDDDLDNLLAQIGDQYADLFLAAKNLSDAILLSDILRVNTE |
| | | ITKAPLSASMIKRYDEHHQDLTLLKALVRQQLPEKYKEIFFDQSKNG |
| | | YAGYIDGGASQEEFYKFIKPILEKMDGTEELLVKLNREDLLRKQRTF |
| | | DNGSIPHQIHLGELHAILRRQEDFYPFLKDNREKIEKILTFRIPYYVGP |
| | | LARGNSRFAWMTRKSEETITPWNFEEVVDKGASAQSFIERMTNFDK |
| | | NLPNEKVLPKHSLLYEYFTVYNELTKVKYVTEGMRKPAFLSGEQKK |
| | | AIVDLLFKTNRKVTVKQLKEDYFKKIECFDSVEISGVEDRFNASLGT |
| | | YHDLLKIIKDKDFLDNEENEDILEDIVLTLTLFEDREMIEERLKTYAH |
| | | LFDDKVMKQLKRRRYTGWGRLSRKLINGIRDKQSGKTILDFLKSDG |
| | | FANRNFMQLIHDDSLTFKEDIQKAQVSGQGDSLHEHIANLAGSPAIK |
| | | KGILQTVKVVDELVKVMGRHKPENIVIEMARENQTTQKGQKNSRER |
| | | MKRIEEGIKELGSQILKEHPVENTQLQNEKLYLYYLQNGRDMYVDQ |
| | | ELDINRLSDYDVDAIVPQSFLKDDSIDNKVLTRSDKNRGKSDNVPSE |
| | | EVVKKMKNYWRQLLNAKLITQRKFDNLTKAERGGLSELDKAGFIKR |
| | | QLVETRQITKHVAQILDSRMNTKYDENDKLIREVKVITLKSKLVSDF |
| | | RKDFQFYKVREINNYHHAHDAYLNAVVGTALIKKYPKLESEFVYGD |
| | | YKVYDVRKMIAKSEQEIGKATAKYFFYSNIMNFFKTEITLANGEIRK |
| | | RPLIETNGETGEIVWDKGRDFATVRKVLSMPQVNIVKKTEVQTGGFS |
| | | KESILPKRNSDKLIARKKDWDPKKYGGFDSPTVAYSVLVVAKVEKG |
| | | KSKKLKSVKELLGITIMERSSFEKNPIDFLEAKGYKEVKKDLIIKLPKY |
| | | SLFELENGRKRMLASAGELQKGNELALPSKYVNFLYLASHYEKLKG |
| | | SPEDNEQKQLFVEQHKHYLDEIIEQISEFSKRVILADANLDKVLSAYN |
| | | KHRDKPIREQAENIIHLFTLTNLGAPAAFKYFDTTIDRKRYTSTKEVL |
| | | DATLIHQSITGLYETRIDLSQLGGDPKKKRKVSGSETPGTSESATPEST |
| | | GRTLVTFKDVFVDFTREEWKLLDTAQQIVYRNVMLENYKNLVSLG |
| | | YQLTKPDVILRLEKGEEPSTEPSEGSAPGTSTEPSETGMADKEAAFDD |
| | | AVEERVINEEYKIWKKNTPFLYDLVMTHALEWPSLTAQWLPDVTRP |
| | | EGKDFSIHRLVLGTHTSDEQNHLVIASVQLPNDDAQFDASHYDSEKG |
| | | EFGGFGSVSGKIEIEIKINHEGEVNRARYMPQNPCIIATKTPSSDVLVF |
| | | DYTKHPSKPDPSGECNPDLRLRGHQKEGYGLSWNPNLSGHLLSASD |
| | | DHTICLWDISAVPKEGKVVDAKTIFTGHTAVVEDVSWHLLHESLFGS |
| | | VADDQKLMIWDTRSNNTSKPSHSVDAHTAEVNCLSFNPYSEFILATG |
| | | SADKTVALWDLRNLKLKLHSFESHKDEIFQVQWSPHNETILASSGTD |
| | | RRLNVWDLSKIGEEQSPEDAEDGPPELLFIHGGHTAKISDFSWNPNEP |
| | | WVICSVSEDNIMQVWQMAENIYNDEDPEGSVDPEGQGS |
| 1020 | :DNMT3A/ | MNHDQEFDPPKVYPPVPAEKRKPIRVLSLFDGIATGLLVLKDLGIQV |
| | L- | DRYIASEVCEDSITVGMVRHQGKIMYVGDVRSVTQKHIQEWGPFDL |
| | dSpCas9- | VIGGSPCNDLSIVNPARKGLYEGTGRLFFEFYRLLHDARPKEGDDRPF |
| | XTEN16- | FWLFENVVAMGVSDKRDISRFLESNPVMIDAKEVSAAHRARYFWG |
| | KOX1KR | NLPGMNRPLASTVNDKLELQECLEHGRIAKFSKVRTITTRSNSIKQGK |
| | AB- | DQHFPVFMNEKEDILWCTEMERVFGFPVHYTDVSNMSRLARQRLLG |
| | RCOR1 | RSWSVPVIRHLFAPLKEYFACVSSGNSNANSRGPSFSSGLVPLSLRGS |
| | | HMGPMEIYKTVSAWKRQPVRVLSLFRNIDKVLKSLGFLESGSGSGG |
| | | GTLKYVEDVTNVVRRDVEKWGPFDLVYGSTQPLGSSCDRCPGWYM |
| | | FQFHRILQYALPRQESQRPFFWIFMDNLLLTEDDQETTTRFLQTEAVT |
| | | LQDVRGRDYQNAMRVWSNIPGLKSKHAPLTPKEEEYLQAQVRSRSK |
| | | LDAPKVDLLVKNCLLPLREYFKYFSQNSLPLGGPSSGAPPPSGGSPAG |
| | | SPTSTEEGTSESATPESGPGTSTEPSEGSAPGSPAGSPTSTEEGTSTEPS |
| | | EGSAPGTSTEPSEPKKKRKVYMDKKYSIGLAIGTNSVGWAVITDEYK |
| | | VPSKKFKVLGNTDRHSIKKNLIGALLFDSGETAEATRLKRTARRRYT |
| | | RRKNRICYLQEIFSNEMAKVDDSFFHRLEESFLVEEDKKHERHPIFGN |
| | | IVDEVAYHEKYPTIYHLRKKLVDSTDKADLRLIYLALAHMIKFRGHF |
| | | LIEGDLNPDNSDVDKLFIQLVQTYNQLFEENPINASGVDAKAILSARL |
| | | SKSRRLENLIAQLPGEKKNGLFGNLIALSLGLTPNFKSNFDLAEDAKL |
| | | QLSKDTYDDDLDNLLAQIGDQYADLFLAAKNLSDAILLSDILRVNTE |
| | | ITKAPLSASMIKRYDEHHQDLTLLKALVRQQLPEKYKEIFFDQSKNG |
| | | YAGYIDGGASQEEFYKFIKPILEKMDGTEELLVKLNREDLLRKQRTF |
| | | DNGSIPHQIHLGELHAILRRQEDFYPFLKDNREKIEKILTFRIPYYVGP |
| | | LARGNSRFAWMTRKSEETITPWNFEEVVDKGASAQSFIERMTNFDK |
| | | NLPNEKVLPKHSLLYEYFTVYNELTKVKYVTEGMRKPAFLSGEQKK |
| | | AIVDLLFKTNRKVTVKQLKEDYFKKIECFDSVEISGVEDRFNASLGT |
| | | YHDLLKIIKDKDFLDNEENEDILEDIVLTLTLFEDREMIEERLKTYAH |
| | | LFDDKVMKQLKRRRYTGWGRLSRKLINGIRDKQSGKTILDFLKSDG |
| | | FANRNFMQLIHDDSLTFKEDIQKAQVSGQGDSLHEHIANLAGSPAIK |
| | | KGILQTVKVVDELVKVMGRHKPENIVIEMARENQTTQKGQKNSRER |
| | | MKRIEEGIKELGSQILKEHPVENTQLQNEKLYLYYLQNGRDMYVDQ |
| | | ELDINRLSDYDVDAIVPQSFLKDDSIDNKVLTRSDKNRGKSDNVPSE |
| | | EVVKKMKNYWRQLLNAKLITQRKFDNLTKAERGGLSELDKAGFIKR |
| | | QLVETRQITKHVAQILDSRMNTKYDENDKLIREVKVITLKSKLVSDF |
| | | RKDFQFYKVREINNYHHAHDAYLNAVVGTALIKKYPKLESEFVYGD |
| | | YKVYDVRKMIAKSEQEIGKATAKYFFYSNIMNFFKTEITLANGEIRK |
| | | RPLIETNGETGEIVWDKGRDFATVRKVLSMPQVNIVKKTEVQTGGFS |
| | | KESILPKRNSDKLIARKKDWDPKKYGGFDSPTVAYSVLVVAKVEKG |
| | | KSKKLKSVKELLGITIMERSSFEKNPIDFLEAKGYKEVKKDLIIKLPKY |
| | | SLFELENGRKRMLASAGELQKGNELALPSKYVNFLYLASHYEKLKG |
| | | SPEDNEQKQLFVEQHKHYLDEIIEQISEFSKRVILADANLDKVLSAYN |
| | | KHRDKPIREQAENIIHLFTLTNLGAPAAFKYFDTTIDRKRYTSTKEVL |
| | | DATLIHQSITGLYETRIDLSQLGGDPKKKRKVSGSETPGTSESATPEST |
| | | GRTLVTFKDVFVDFTREEWKLLDTAQQIVYRNVMLENYKNLVSLG |
| | | YQLTKPDVILRLEKGEEPSTEPSEGSAPGTSTEPSETGMPAMVEKGPE |
| | | VSGKRRGRNNAAASASAAAASAAASAACASPAATAASGAAASSAS |
| | | AAAASAAAAPNNGQNKSLAAAAPNGNSSSNSWEEGSSGSSSDEEHG |
| | | GGGMRVGPQYQAVVPDFDPAKLARRSQERDNLGMLVWSPNQNLSE |
| | | AKLDEYIAIAKEKHGYNMEQALGMLFWHKHNIEKSLADLPNFTPFP |
| | | DEWTVEDKVLFEQAFSFHGKTFHRIQQMLPDKSIASLVKFYYSWKK |
| | | TRTKTSVMDRHARKQKREREESEDELEEANGNNPIDIEVDQNKESK |
| | | KEVPPTETVPQVKKEKHSTQAKNRAKRKPPKGMFLSQEDVEAVSAN |
| | | ATAATTVLRQLDMELVSVKRQIQNIKQTNSALKEKLDGGIEPYRLPE |
| | | VIQKCNARWTTEEQLLAVQAIRKYGRDFQAISDVIGNKSVVQVKNFF |
| | | VNYRRRFNIDEVLQEWEAEHGKEETNGPSNQKPVKSPDNSIKMPEEE |
| | | DEAPVLDVRYASAS |
| 1021 | :DNMT3A/ | MNHDQEFDPPKVYPPVPAEKRKPIRVLSLFDGIATGLLVLKDLGIQV |
| | L- | DRYIASEVCEDSITVGMVRHQGKIMYVGDVRSVTQKHIQEWGPFDL |
| | dSpCas9- | VIGGSPCNDLSIVNPARKGLYEGTGRLFFEFYRLLHDARPKEGDDRPF |
| | XTEN16- | FWLFENVVAMGVSDKRDISRFLESNPVMIDAKEVSAAHRARYFWG |
| | KOX1KR | NLPGMNRPLASTVNDKLELQECLEHGRIAKFSKVRTITTRSNSIKQGK |
| | AB-EZH2 | DQHFPVFMNEKEDILWCTEMERVFGFPVHYTDVSNMSRLARQRLLG |
| | | RSWSVPVIRHLFAPLKEYFACVSSGNSNANSRGPSFSSGLVPLSLRGS |
| | | HMGPMEIYKTVSAWKRQPVRVLSLFRNIDKVLKSLGFLESGSGSGG |
| | | GTLKYVEDVTNVVRRDVEKWGPFDLVYGSTQPLGSSCDRCPGWYM |
| | | FQFHRILQYALPRQESQRPFFWIFMDNLLLTEDDQETTTRFLQTEAVT |
| | | LQDVRGRDYQNAMRVWSNIPGLKSKHAPLTPKEEEYLQAQVRSRSK |
| | | LDAPKVDLLVKNCLLPLREYFKYFSQNSLPLGGPSSGAPPPSGGSPAG |
| | | SPTSTEEGTSESATPESGPGTSTEPSEGSAPGSPAGSPTSTEEGTSTEPS |
| | | EGSAPGTSTEPSEPKKKRKVYMDKKYSIGLAIGTNSVGWAVITDEYK |
| | | VPSKKFKVLGNTDRHSIKKNLIGALLFDSGETAEATRLKRTARRRYT |
| | | RRKNRICYLQEIFSNEMAKVDDSFFHRLEESFLVEEDKKHERHPIFGN |
| | | IVDEVAYHEKYPTIYHLRKKLVDSTDKADLRLIYLALAHMIKFRGHF |
| | | LIEGDLNPDNSDVDKLFIQLVQTYNQLFEENPINASGVDAKAILSARL |
| | | SKSRRLENLIAQLPGEKKNGLFGNLIALSLGLTPNFKSNFDLAEDAKL |
| | | QLSKDTYDDDLDNLLAQIGDQYADLFLAAKNLSDAILLSDILRVNTE |
| | | ITKAPLSASMIKRYDEHHQDLTLLKALVRQQLPEKYKEIFFDQSKNG |
| | | YAGYIDGGASQEEFYKFIKPILEKMDGTEELLVKLNREDLLRKQRTF |
| | | DNGSIPHQIHLGELHAILRRQEDFYPFLKDNREKIEKILTFRIPYYVGP |
| | | LARGNSRFAWMTRKSEETITPWNFEEVVDKGASAQSFIERMTNFDK |
| | | NLPNEKVLPKHSLLYEYFTVYNELTKVKYVTEGMRKPAFLSGEQKK |
| | | AIVDLLFKTNRKVTVKQLKEDYFKKIECFDSVEISGVEDRFNASLGT |
| | | YHDLLKIIKDKDFLDNEENEDILEDIVLTLTLFEDREMIEERLKTYAH |
| | | LFDDKVMKQLKRRRYTGWGRLSRKLINGIRDKQSGKTILDFLKSDG |
| | | FANRNFMQLIHDDSLTFKEDIQKAQVSGQGDSLHEHIANLAGSPAIK |
| | | KGILQTVKVVDELVKVMGRHKPENIVIEMARENQTTQKGQKNSRER |
| | | MKRIEEGIKELGSQILKEHPVENTQLQNEKLYLYYLQNGRDMYVDQ |
| | | ELDINRLSDYDVDAIVPQSFLKDDSIDNKVLTRSDKNRGKSDNVPSE |
| | | EVVKKMKNYWRQLLNAKLITQRKFDNLTKAERGGLSELDKAGFIKR |
| | | QLVETRQITKHVAQILDSRMNTKYDENDKLIREVKVITLKSKLVSDF |
| | | RKDFQFYKVREINNYHHAHDAYLNAVVGTALIKKYPKLESEFVYGD |
| | | YKVYDVRKMIAKSEQEIGKATAKYFFYSNIMNFFKTEITLANGEIRK |
| | | RPLIETNGETGEIVWDKGRDFATVRKVLSMPQVNIVKKTEVQTGGFS |
| | | KESILPKRNSDKLIARKKDWDPKKYGGFDSPTVAYSVLVVAKVEKG |
| | | KSKKLKSVKELLGITIMERSSFEKNPIDFLEAKGYKEVKKDLIIKLPKY |
| | | SLFELENGRKRMLASAGELQKGNELALPSKYVNFLYLASHYEKLKG |
| | | SPEDNEQKQLFVEQHKHYLDEIIEQISEFSKRVILADANLDKVLSAYN |
| | | KHRDKPIREQAENIIHLFTLTNLGAPAAFKYFDTTIDRKRYTSTKEVL |
| | | DATLIHQSITGLYETRIDLSQLGGDPKKKRKVSGSETPGTSESATPEST |
| | | GRTLVTFKDVFVDFTREEWKLLDTAQQIVYRNVMLENYKNLVSLG |
| | | YQLTKPDVILRLEKGEEPSTEPSEGSAPGTSTEPSETGMGQTGKKSEK |
| | | GPVCWRKRVKSEYMRLRQLKRFRRADEVKSMFSSNRQKILERTEIL |
| | | NQEWKQRRIQPVHILTSVSSLRGTRECSVTSDLDFPTQVIPLKTLNAV |
| | | ASVPIMYSWSPLQQNFMVEDETVLHNIPYMGDEVLDQDGTFIEELIK |
| | | NYDGKVHGDRECGFINDEIFVELVNALGQYNDDDDDDDGDDPEERE |
| | | EKQKDLEDHRDDKESRPPRKFPSDKIFEAISSMFPDKGTAEELKEKY |
| | | KELTEQQLPGALPPECTPNIDGPNAKSVQREQSLHSFHTLFCRRCFKY |
| | | DCFLHPFHATPNTYKRKNTETALDNKPCGPQCYQHLEGAKEFAAAL |
| | | TAERIKTPPKRPGGRRRGRLPNNSSRPSTPTINVLESKDTDSDREAGT |
| | | ETGGENNDKEEEEKKDETSSSSEANSRCQTPIKMKPNIEPPENVEWS |
| | | GAEASMFRVLIGTYYDNFCAIARLIGTKTCRQVYEFRVKESSIIAPAP |
| | | AEDVDTPPRKKKRKHRLWAAHCRKIQLKKDGSSNHVYNYQPCDHP |
| | | RQPCDSSCPCVIAQNFCEKFCQCSSECQNRFPGCRCKAQCNTKQCPC |
| | | YLAVRECDPDLCLTCGAADHWDSKNVSCKNCSIQRGSKKHLLLAPS |
| | | DVAGWGIFIKDPVQKNEFISEYCGEIISQDEADRRGKVYDKYMCSFL |
| | | FNLNNDFVVDATRKGNKIRFANHSVNPNCYAKVMMVNGDHRIGIF |
| | | AKRAIQTGEELFFDYRYSQADALKYVGIEREMEIP |
| 1022 | Cas-ZIM3 | MGTPKKKRKVMDKKYSIGLAIGTNSVGWAVITDEYKVPSKKFKVLG |
| | | NTDRHSIKKNLIGALLFDSGETAEATRLKRTARRRYTRRKNRICYLQ |
| | | EIFSNEMAKVDDSFFHRLEESFLVEEDKKHERHPIFGNIVDEVAYHEK |
| | | YPTIYHLRKKLVDSTDKADLRLIYLALAHMIKFRGHFLIEGDLNPDNS |
| | | DVDKLFIQLVQTYNQLFEENPINASGVDAKAILSARLSKSRRLENLIA |
| | | QLPGEKKNGLFGNLIALSLGLTPNFKSNFDLAEDAKLQLSKDTYDDD |
| | | LDNLLAQIGDQYADLFLAAKNLSDAILLSDILRVNTEITKAPLSASMI |
| | | KRYDEHHQDLTLLKALVRQQLPEKYKEIFFDQSKNGYAGYIDGGAS |
| | | QEEFYKFIKPILEKMDGTEELLVKLNREDLLRKQRTFDNGSIPHQIHL |
| | | GELHAILRRQEDFYPFLKDNREKIEKILTFRIPYYVGPLARGNSRFAW |
| | | MTRKSEETITPWNFEEVVDKGASAQSFIERMTNFDKNLPNEKVLPKH |
| | | SLLYEYFTVYNELTKVKYVTEGMRKPAFLSGEQKKAIVDLLFKTNR |
| | | KVTVKQLKEDYFKKIECFDSVEISGVEDRFNASLGTYHDLLKIIKDKD |
| | | FLDNEENEDILEDIVLTLTLFEDREMIEERLKTYAHLFDDKVMKQLK |
| | | RRRYTGWGRLSRKLINGIRDKQSGKTILDFLKSDGFANRNFMQLIHD |
| | | DSLTFKEDIQKAQVSGQGDSLHEHIANLAGSPAIKKGILQTVKVVDE |
| | | LVKVMGRHKPENIVIEMARENQTTQKGQKNSRERMKRIEEGIKELGS |
| | | QILKEHPVENTQLQNEKLYLYYLQNGRDMYVDQELDINRLSDYDVD |
| | | AIVPQSFLKDDSIDNKVLTRSDKNRGKSDNVPSEEVVKKMKNYWRQ |
| | | LLNAKLITQRKFDNLTKAERGGLSELDKAGFIKRQLVETRQITKHVA |
| | | QILDSRMNTKYDENDKLIREVKVITLKSKLVSDFRKDFQFYKVREIN |
| | | NYHHAHDAYLNAVVGTALIKKYPKLESEFVYGDYKVYDVRKMIAK |
| | | SEQEIGKATAKYFFYSNIMNFFKTEITLANGEIRKRPLIETNGETGEIV |
| | | WDKGRDFATVRKVLSMPQVNIVKKTEVQTGGFSKESILPKRNSDKLI |
| | | ARKKDWDPKKYGGFDSPTVAYSVLVVAKVEKGKSKKLKSVKELLG |
| | | ITIMERSSFEKNPIDFLEAKGYKEVKKDLIIKLPKYSLFELENGRKRML |
| | | ASAGELQKGNELALPSKYVNFLYLASHYEKLKGSPEDNEQKQLFVE |
| | | QHKHYLDEIIEQISEFSKRVILADANLDKVLSAYNKHRDKPIREQAEN |
| | | IIHLFTLTNLGAPAAFKYFDTTIDRKRYTSTKEVLDATLIHQSITGLYE |
| | | TRIDLSQLGGDPKKKRKVGGPSSGAPPPSGGSPAGSPTSTEEGTSESA |
| | | TPESGPGTSTEPSEGSAPGSPAGSPTSTEEGTSTEPSEGSAPGTSTEPSE |
| | | TGMNNSQGRVTFEDVTVNFTQGEWQRLNPEQRNLYRDVMLENYSN |
| | | LVSVGQGETTKPDVILRLEQGKEPWLEEEEVLGSGRAEKNGDIGGQI |
| | | WKPKDVKESL |
| 1023 | Cas- | MGTPKKKRKVMDKKYSIGLAIGTNSVGWAVITDEYKVPSKKFKVLG |
| | ZNF554 | NTDRHSIKKNLIGALLFDSGETAEATRLKRTARRRYTRRKNRICYLQ |
| | | EIFSNEMAKVDDSFFHRLEESFLVEEDKKHERHPIFGNIVDEVAYHEK |
| | | YPTIYHLRKKLVDSTDKADLRLIYLALAHMIKFRGHFLIEGDLNPDNS |
| | | DVDKLFIQLVQTYNQLFEENPINASGVDAKAILSARLSKSRRLENLIA |
| | | QLPGEKKNGLFGNLIALSLGLTPNFKSNFDLAEDAKLQLSKDTYDDD |
| | | LDNLLAQIGDQYADLFLAAKNLSDAILLSDILRVNTEITKAPLSASMI |
| | | KRYDEHHQDLTLLKALVRQQLPEKYKEIFFDQSKNGYAGYIDGGAS |
| | | QEEFYKFIKPILEKMDGTEELLVKLNREDLLRKQRTFDNGSIPHQIHL |
| | | GELHAILRRQEDFYPFLKDNREKIEKILTFRIPYYVGPLARGNSRFAW |
| | | MTRKSEETITPWNFEEVVDKGASAQSFIERMTNFDKNLPNEKVLPKH |
| | | SLLYEYFTVYNELTKVKYVTEGMRKPAFLSGEQKKAIVDLLFKTNR |
| | | KVTVKQLKEDYFKKIECFDSVEISGVEDRFNASLGTYHDLLKIIKDKD |
| | | FLDNEENEDILEDIVLTLTLFEDREMIEERLKTYAHLFDDKVMKQLK |
| | | RRRYTGWGRLSRKLINGIRDKQSGKTILDFLKSDGFANRNFMQLIHD |
| | | DSLTFKEDIQKAQVSGQGDSLHEHIANLAGSPAIKKGILQTVKVVDE |
| | | LVKVMGRHKPENIVIEMARENQTTQKGQKNSRERMKRIEEGIKELGS |
| | | QILKEHPVENTQLQNEKLYLYYLQNGRDMYVDQELDINRLSDYDVD |
| | | AIVPQSFLKDDSIDNKVLTRSDKNRGKSDNVPSEEVVKKMKNYWRQ |
| | | LLNAKLITQRKFDNLTKAERGGLSELDKAGFIKRQLVETRQITKHVA |
| | | QILDSRMNTKYDENDKLIREVKVITLKSKLVSDFRKDFQFYKVREIN |
| | | NYHHAHDAYLNAVVGTALIKKYPKLESEFVYGDYKVYDVRKMIAK |
| | | SEQEIGKATAKYFFYSNIMNFFKTEITLANGEIRKRPLIETNGETGEIV |
| | | WDKGRDFATVRKVLSMPQVNIVKKTEVQTGGFSKESILPKRNSDKLI |
| | | ARKKDWDPKKYGGFDSPTVAYSVLVVAKVEKGKSKKLKSVKELLG |
| | | ITIMERSSFEKNPIDFLEAKGYKEVKKDLIIKLPKYSLFELENGRKRML |
| | | ASAGELQKGNELALPSKYVNFLYLASHYEKLKGSPEDNEQKQLFVE |
| | | QHKHYLDEIIEQISEFSKRVILADANLDKVLSAYNKHRDKPIREQAEN |
| | | IIHLFTLTNLGAPAAFKYFDTTIDRKRYTSTKEVLDATLIHQSITGLYE |
| | | TRIDLSQLGGDPKKKRKVGGPSSGAPPPSGGSPAGSPTSTEEGTSESA |
| | | TPESGPGTSTEPSEGSAPGSPAGSPTSTEEGTSTEPSEGSAPGTSTEPSE |
| | | TGMFSQEERMAAGYLPRWSQELVTFEDVSMDFSQEEWELLEPAQK |
| | | NLYREVMLENYRNVVSLEALKNQCTDVGIKEGPLSPAQTSQVTSLSS |
| | | WTGYLLFQPVASSHLEQREALWIEEKGTPQASCSDWMTVLRNQDST |
| | | YKKVALQE |
| 1024 | Cas- | MGTPKKKRKVMDKKYSIGLAIGTNSVGWAVITDEYKVPSKKFKVLG |
| | ZNF264 | NTDRHSIKKNLIGALLFDSGETAEATRLKRTARRRYTRRKNRICYLQ |
| | | EIFSNEMAKVDDSFFHRLEESFLVEEDKKHERHPIFGNIVDEVAYHEK |
| | | YPTIYHLRKKLVDSTDKADLRLIYLALAHMIKFRGHFLIEGDLNPDNS |
| | | DVDKLFIQLVQTYNQLFEENPINASGVDAKAILSARLSKSRRLENLIA |
| | | QLPGEKKNGLFGNLIALSLGLTPNFKSNFDLAEDAKLQLSKDTYDDD |
| | | LDNLLAQIGDQYADLFLAAKNLSDAILLSDILRVNTEITKAPLSASMI |
| | | KRYDEHHQDLTLLKALVRQQLPEKYKEIFFDQSKNGYAGYIDGGAS |
| | | QEEFYKFIKPILEKMDGTEELLVKLNREDLLRKQRTFDNGSIPHQIHL |
| | | GELHAILRRQEDFYPFLKDNREKIEKILTFRIPYYVGPLARGNSRFAW |
| | | MTRKSEETITPWNFEEVVDKGASAQSFIERMTNFDKNLPNEKVLPKH |
| | | SLLYEYFTVYNELTKVKYVTEGMRKPAFLSGEQKKAIVDLLFKTNR |
| | | KVTVKQLKEDYFKKIECFDSVEISGVEDRFNASLGTYHDLLKIIKDKD |
| | | FLDNEENEDILEDIVLTLTLFEDREMIEERLKTYAHLFDDKVMKQLK |
| | | RRRYTGWGRLSRKLINGIRDKQSGKTILDFLKSDGFANRNFMQLIHD |
| | | DSLTFKEDIQKAQVSGQGDSLHEHIANLAGSPAIKKGILQTVKVVDE |
| | | LVKVMGRHKPENIVIEMARENQTTQKGQKNSRERMKRIEEGIKELGS |
| | | QILKEHPVENTQLQNEKLYLYYLQNGRDMYVDQELDINRLSDYDVD |
| | | AIVPQSFLKDDSIDNKVLTRSDKNRGKSDNVPSEEVVKKMKNYWRQ |
| | | LLNAKLITQRKFDNLTKAERGGLSELDKAGFIKRQLVETRQITKHVA |
| | | QILDSRMNTKYDENDKLIREVKVITLKSKLVSDFRKDFQFYKVREIN |
| | | NYHHAHDAYLNAVVGTALIKKYPKLESEFVYGDYKVYDVRKMIAK |
| | | SEQEIGKATAKYFFYSNIMNFFKTEITLANGEIRKRPLIETNGETGEIV |
| | | WDKGRDFATVRKVLSMPQVNIVKKTEVQTGGFSKESILPKRNSDKLI |
| | | ARKKDWDPKKYGGFDSPTVAYSVLVVAKVEKGKSKKLKSVKELLG |
| | | ITIMERSSFEKNPIDFLEAKGYKEVKKDLIIKLPKYSLFELENGRKRML |
| | | ASAGELQKGNELALPSKYVNFLYLASHYEKLKGSPEDNEQKQLFVE |
| | | QHKHYLDEIIEQISEFSKRVILADANLDKVLSAYNKHRDKPIREQAEN |
| | | IIHLFTLTNLGAPAAFKYFDTTIDRKRYTSTKEVLDATLIHQSITGLYE |
| | | TRIDLSQLGGDPKKKRKVGGPSSGAPPPSGGSPAGSPTSTEEGTSESA |
| | | TPESGPGTSTEPSEGSAPGSPAGSPTSTEEGTSTEPSEGSAPGTSTEPSE |
| | | TGMAAAVLTDRAQVSVTFDDVAVTFTKEEWGQLDLAQRTLYQEV |
| | | MLENCGLLVSLGCPVPKAELICHLEHGQEPWTRKEDLSQDTCPGDK |
| | | GKPKTTEPTTCEPALSE |
| | Cas- | MGTPKKKRKVMDKKYSIGLAIGTNSVGWAVITDEYKVPSKKFKVLG |
| 1025 | ZNF354A | NTDRHSIKKNLIGALLFDSGETAEATRLKRTARRRYTRRKNRICYLQ |
| | | EIFSNEMAKVDDSFFHRLEESFLVEEDKKHERHPIFGNIVDEVAYHEK |
| | | YPTIYHLRKKLVDSTDKADLRLIYLALAHMIKFRGHFLIEGDLNPDNS |
| | | DVDKLFIQLVQTYNQLFEENPINASGVDAKAILSARLSKSRRLENLIA |
| | | QLPGEKKNGLFGNLIALSLGLTPNFKSNFDLAEDAKLQLSKDTYDDD |
| | | LDNLLAQIGDQYADLFLAAKNLSDAILLSDILRVNTEITKAPLSASMI |
| | | KRYDEHHQDLTLLKALVRQQLPEKYKEIFFDQSKNGYAGYIDGGAS |
| | | QEEFYKFIKPILEKMDGTEELLVKLNREDLLRKQRTFDNGSIPHQIHL |
| | | GELHAILRRQEDFYPFLKDNREKIEKILTFRIPYYVGPLARGNSRFAW |
| | | MTRKSEETITPWNFEEVVDKGASAQSFIERMTNFDKNLPNEKVLPKH |
| | | SLLYEYFTVYNELTKVKYVTEGMRKPAFLSGEQKKAIVDLLFKTNR |
| | | KVTVKQLKEDYFKKIECFDSVEISGVEDRFNASLGTYHDLLKIIKDKD |
| | | FLDNEENEDILEDIVLTLTLFEDREMIEERLKTYAHLFDDKVMKQLK |
| | | RRRYTGWGRLSRKLINGIRDKQSGKTILDFLKSDGFANRNFMQLIHD |
| | | DSLTFKEDIQKAQVSGQGDSLHEHIANLAGSPAIKKGILQTVKVVDE |
| | | LVKVMGRHKPENIVIEMARENQTTQKGQKNSRERMKRIEEGIKELGS |
| | | QILKEHPVENTQLQNEKLYLYYLQNGRDMYVDQELDINRLSDYDVD |
| | | AIVPQSFLKDDSIDNKVLTRSDKNRGKSDNVPSEEVVKKMKNYWRQ |
| | | LLNAKLITQRKFDNLTKAERGGLSELDKAGFIKRQLVETRQITKHVA |
| | | QILDSRMNTKYDENDKLIREVKVITLKSKLVSDFRKDFQFYKVREIN |
| | | NYHHAHDAYLNAVVGTALIKKYPKLESEFVYGDYKVYDVRKMIAK |
| | | SEQEIGKATAKYFFYSNIMNFFKTEITLANGEIRKRPLIETNGETGEIV |
| | | WDKGRDFATVRKVLSMPQVNIVKKTEVQTGGFSKESILPKRNSDKLI |
| | | ARKKDWDPKKYGGFDSPTVAYSVLVVAKVEKGKSKKLKSVKELLG |
| | | ITIMERSSFEKNPIDFLEAKGYKEVKKDLIIKLPKYSLFELENGRKRML |
| | | ASAGELQKGNELALPSKYVNFLYLASHYEKLKGSPEDNEQKQLFVE |
| | | QHKHYLDEIIEQISEFSKRVILADANLDKVLSAYNKHRDKPIREQAEN |
| | | IIHLFTLTNLGAPAAFKYFDTTIDRKRYTSTKEVLDATLIHQSITGLYE |
| | | TRIDLSQLGGDPKKKRKVGGPSSGAPPPSGGSPAGSPTSTEEGTSESA |
| | | TPESGPGTSTEPSEGSAPGSPAGSPTSTEEGTSTEPSEGSAPGTSTEPSE |
| | | TGMAAGQREARPQVSLTFEDVAVLFTRDEWRKLAPSQRNLYRDVM |
| | | LENYRNLVSLGLPFTKPKVISLLQQGEDPWEVEKDGSGVSSLGSKSS |
| | | HKTTKSTQTQDSSFQ |
| 1026 | Cas- | MGTPKKKRKVMDKKYSIGLAIGTNSVGWAVITDEYKVPSKKFKVLG |
| | ZNF324 | NTDRHSIKKNLIGALLFDSGETAEATRLKRTARRRYTRRKNRICYLQ |
| | | EIFSNEMAKVDDSFFHRLEESFLVEEDKKHERHPIFGNIVDEVAYHEK |
| | | YPTIYHLRKKLVDSTDKADLRLIYLALAHMIKFRGHFLIEGDLNPDNS |
| | | DVDKLFIQLVQTYNQLFEENPINASGVDAKAILSARLSKSRRLENLIA |
| | | QLPGEKKNGLFGNLIALSLGLTPNFKSNFDLAEDAKLQLSKDTYDDD |
| | | LDNLLAQIGDQYADLFLAAKNLSDAILLSDILRVNTEITKAPLSASMI |
| | | KRYDEHHQDLTLLKALVRQQLPEKYKEIFFDQSKNGYAGYIDGGAS |
| | | QEEFYKFIKPILEKMDGTEELLVKLNREDLLRKQRTFDNGSIPHQIHL |
| | | GELHAILRRQEDFYPFLKDNREKIEKILTFRIPYYVGPLARGNSRFAW |
| | | MTRKSEETITPWNFEEVVDKGASAQSFIERMTNFDKNLPNEKVLPKH |
| | | SLLYEYFTVYNELTKVKYVTEGMRKPAFLSGEQKKAIVDLLFKTNR |
| | | KVTVKQLKEDYFKKIECFDSVEISGVEDRFNASLGTYHDLLKIIKDKD |
| | | FLDNEENEDILEDIVLTLTLFEDREMIEERLKTYAHLFDDKVMKQLK |
| | | RRRYTGWGRLSRKLINGIRDKQSGKTILDFLKSDGFANRNFMQLIHD |
| | | DSLTFKEDIQKAQVSGQGDSLHEHIANLAGSPAIKKGILQTVKVVDE |
| | | LVKVMGRHKPENIVIEMARENQTTQKGQKNSRERMKRIEEGIKELGS |
| | | QILKEHPVENTQLQNEKLYLYYLQNGRDMYVDQELDINRLSDYDVD |
| | | AIVPQSFLKDDSIDNKVLTRSDKNRGKSDNVPSEEVVKKMKNYWRQ |
| | | LLNAKLITQRKFDNLTKAERGGLSELDKAGFIKRQLVETRQITKHVA |
| | | QILDSRMNTKYDENDKLIREVKVITLKSKLVSDFRKDFQFYKVREIN |
| | | NYHHAHDAYLNAVVGTALIKKYPKLESEFVYGDYKVYDVRKMIAK |
| | | SEQEIGKATAKYFFYSNIMNFFKTEITLANGEIRKRPLIETNGETGEIV |
| | | WDKGRDFATVRKVLSMPQVNIVKKTEVQTGGFSKESILPKRNSDKLI |
| | | ARKKDWDPKKYGGFDSPTVAYSVLVVAKVEKGKSKKLKSVKELLG |
| | | ITIMERSSFEKNPIDFLEAKGYKEVKKDLIIKLPKYSLFELENGRKRML |
| | | ASAGELQKGNELALPSKYVNFLYLASHYEKLKGSPEDNEQKQLFVE |
| | | QHKHYLDEIIEQISEFSKRVILADANLDKVLSAYNKHRDKPIREQAEN |
| | | IIHLFTLTNLGAPAAFKYFDTTIDRKRYTSTKEVLDATLIHQSITGLYE |
| | | TRIDLSQLGGDPKKKRKVGGPSSGAPPPSGGSPAGSPTSTEEGTSESA |
| | | TPESGPGTSTEPSEGSAPGSPAGSPTSTEEGTSTEPSEGSAPGTSTEPSE |
| | | TGMAFEDVAVYFSQEEWGLLDTAQRALYRRVMLDNFALVASLGLS |
| | | TSRPRVVIQLERGEEPWVPSGTDTTLSRTTYRRRNPGSWSLTEDRDV |
| | | SG |
| 1027 | Cas-ZFP28 | MGTPKKKRKVMDKKYSIGLAIGTNSVGWAVITDEYKVPSKKFKVLG |
| | | NTDRHSIKKNLIGALLFDSGETAEATRLKRTARRRYTRRKNRICYLQ |
| | | EIFSNEMAKVDDSFFHRLEESFLVEEDKKHERHPIFGNIVDEVAYHEK |
| | | YPTIYHLRKKLVDSTDKADLRLIYLALAHMIKFRGHFLIEGDLNPDNS |
| | | DVDKLFIQLVQTYNQLFEENPINASGVDAKAILSARLSKSRRLENLIA |
| | | QLPGEKKNGLFGNLIALSLGLTPNFKSNFDLAEDAKLQLSKDTYDDD |
| | | LDNLLAQIGDQYADLFLAAKNLSDAILLSDILRVNTEITKAPLSASMI |
| | | KRYDEHHQDLTLLKALVRQQLPEKYKEIFFDQSKNGYAGYIDGGAS |
| | | QEEFYKFIKPILEKMDGTEELLVKLNREDLLRKQRTFDNGSIPHQIHL |
| | | GELHAILRRQEDFYPFLKDNREKIEKILTFRIPYYVGPLARGNSRFAW |
| | | MTRKSEETITPWNFEEVVDKGASAQSFIERMTNFDKNLPNEKVLPKH |
| | | SLLYEYFTVYNELTKVKYVTEGMRKPAFLSGEQKKAIVDLLFKTNR |
| | | KVTVKQLKEDYFKKIECFDSVEISGVEDRFNASLGTYHDLLKIIKDKD |
| | | FLDNEENEDILEDIVLTLTLFEDREMIEERLKTYAHLFDDKVMKQLK |
| | | RRRYTGWGRLSRKLINGIRDKQSGKTILDFLKSDGFANRNFMQLIHD |
| | | DSLTFKEDIQKAQVSGQGDSLHEHIANLAGSPAIKKGILQTVKVVDE |
| | | LVKVMGRHKPENIVIEMARENQTTQKGQKNSRERMKRIEEGIKELGS |
| | | QILKEHPVENTQLQNEKLYLYYLQNGRDMYVDQELDINRLSDYDVD |
| | | AIVPQSFLKDDSIDNKVLTRSDKNRGKSDNVPSEEVVKKMKNYWRQ |
| | | LLNAKLITQRKFDNLTKAERGGLSELDKAGFIKRQLVETRQITKHVA |
| | | QILDSRMNTKYDENDKLIREVKVITLKSKLVSDFRKDFQFYKVREIN |
| | | NYHHAHDAYLNAVVGTALIKKYPKLESEFVYGDYKVYDVRKMIAK |
| | | SEQEIGKATAKYFFYSNIMNFFKTEITLANGEIRKRPLIETNGETGEIV |
| | | WDKGRDFATVRKVLSMPQVNIVKKTEVQTGGFSKESILPKRNSDKLI |
| | | ARKKDWDPKKYGGFDSPTVAYSVLVVAKVEKGKSKKLKSVKELLG |
| | | ITIMERSSFEKNPIDFLEAKGYKEVKKDLIIKLPKYSLFELENGRKRML |
| | | ASAGELQKGNELALPSKYVNFLYLASHYEKLKGSPEDNEQKQLFVE |
| | | QHKHYLDEIIEQISEFSKRVILADANLDKVLSAYNKHRDKPIREQAEN |
| | | IIHLFTLTNLGAPAAFKYFDTTIDRKRYTSTKEVLDATLIHQSITGLYE |
| | | TRIDLSQLGGDPKKKRKVGGPSSGAPPPSGGSPAGSPTSTEEGTSESA |
| | | TPESGPGTSTEPSEGSAPGSPAGSPTSTEEGTSTEPSEGSAPGTSTEPSE |
| | | TGNKKLEAVGTGIEPKAMSQGLVTFGDVAVDFSQEEWEWLNPIQRN |
| | | LYRKVMLENYRNLASLGLCVSKPDVISSLEQGKEPW |
| 1028 | Cas-ZN627 | MGTPKKKRKVMDKKYSIGLAIGTNSVGWAVITDEYKVPSKKFKVLG |
| | | NTDRHSIKKNLIGALLFDSGETAEATRLKRTARRRYTRRKNRICYLQ |
| | | EIFSNEMAKVDDSFFHRLEESFLVEEDKKHERHPIFGNIVDEVAYHEK |
| | | YPTIYHLRKKLVDSTDKADLRLIYLALAHMIKFRGHFLIEGDLNPDNS |
| | | DVDKLFIQLVQTYNQLFEENPINASGVDAKAILSARLSKSRRLENLIA |
| | | QLPGEKKNGLFGNLIALSLGLTPNFKSNFDLAEDAKLQLSKDTYDDD |
| | | LDNLLAQIGDQYADLFLAAKNLSDAILLSDILRVNTEITKAPLSASMI |
| | | KRYDEHHQDLTLLKALVRQQLPEKYKEIFFDQSKNGYAGYIDGGAS |
| | | QEEFYKFIKPILEKMDGTEELLVKLNREDLLRKQRTFDNGSIPHQIHL |
| | | GELHAILRRQEDFYPFLKDNREKIEKILTFRIPYYVGPLARGNSRFAW |
| | | MTRKSEETITPWNFEEVVDKGASAQSFIERMTNFDKNLPNEKVLPKH |
| | | SLLYEYFTVYNELTKVKYVTEGMRKPAFLSGEQKKAIVDLLFKTNR |
| | | KVTVKQLKEDYFKKIECFDSVEISGVEDRFNASLGTYHDLLKIIKDKD |
| | | FLDNEENEDILEDIVLTLTLFEDREMIEERLKTYAHLFDDKVMKQLK |
| | | RRRYTGWGRLSRKLINGIRDKQSGKTILDFLKSDGFANRNFMQLIHD |
| | | DSLTFKEDIQKAQVSGQGDSLHEHIANLAGSPAIKKGILQTVKVVDE |
| | | LVKVMGRHKPENIVIEMARENQTTQKGQKNSRERMKRIEEGIKELGS |
| | | QILKEHPVENTQLQNEKLYLYYLQNGRDMYVDQELDINRLSDYDVD |
| | | AIVPQSFLKDDSIDNKVLTRSDKNRGKSDNVPSEEVVKKMKNYWRQ |
| | | LLNAKLITQRKFDNLTKAERGGLSELDKAGFIKRQLVETRQITKHVA |
| | | QILDSRMNTKYDENDKLIREVKVITLKSKLVSDFRKDFQFYKVREIN |
| | | NYHHAHDAYLNAVVGTALIKKYPKLESEFVYGDYKVYDVRKMIAK |
| | | SEQEIGKATAKYFFYSNIMNFFKTEITLANGEIRKRPLIETNGETGEIV |
| | | WDKGRDFATVRKVLSMPQVNIVKKTEVQTGGFSKESILPKRNSDKLI |
| | | ARKKDWDPKKYGGFDSPTVAYSVLVVAKVEKGKSKKLKSVKELLG |
| | | ITIMERSSFEKNPIDFLEAKGYKEVKKDLIIKLPKYSLFELENGRKRML |
| | | ASAGELQKGNELALPSKYVNFLYLASHYEKLKGSPEDNEQKQLFVE |
| | | QHKHYLDEIIEQISEFSKRVILADANLDKVLSAYNKHRDKPIREQAEN |
| | | IIHLFTLTNLGAPAAFKYFDTTIDRKRYTSTKEVLDATLIHQSITGLYE |
| | | TRIDLSQLGGDPKKKRKVGGPSSGAPPPSGGSPAGSPTSTEEGTSESA |
| | | TPESGPGTSTEPSEGSAPGSPAGSPTSTEEGTSTEPSEGSAPGTSTEPSE |
| | | TGDSVAFEDVAVNFTLEEWALLDPSQKNLYRDVMRETFRNLASVG |
| | | KQWEDQNIEDPFKIPRRNISHIPERLCESKEGGQGEE |
| 1029 | Cas-ZN793 | MGTPKKKRKVMDKKYSIGLAIGTNSVGWAVITDEYKVPSKKFKVLG |
| | | NTDRHSIKKNLIGALLFDSGETAEATRLKRTARRRYTRRKNRICYLQ |
| | | EIFSNEMAKVDDSFFHRLEESFLVEEDKKHERHPIFGNIVDEVAYHEK |
| | | YPTIYHLRKKLVDSTDKADLRLIYLALAHMIKFRGHFLIEGDLNPDNS |
| | | DVDKLFIQLVQTYNQLFEENPINASGVDAKAILSARLSKSRRLENLIA |
| | | QLPGEKKNGLFGNLIALSLGLTPNFKSNFDLAEDAKLQLSKDTYDDD |
| | | LDNLLAQIGDQYADLFLAAKNLSDAILLSDILRVNTEITKAPLSASMI |
| | | KRYDEHHQDLTLLKALVRQQLPEKYKEIFFDQSKNGYAGYIDGGAS |
| | | QEEFYKFIKPILEKMDGTEELLVKLNREDLLRKQRTFDNGSIPHQIHL |
| | | GELHAILRRQEDFYPFLKDNREKIEKILTFRIPYYVGPLARGNSRFAW |
| | | MTRKSEETITPWNFEEVVDKGASAQSFIERMTNFDKNLPNEKVLPKH |
| | | SLLYEYFTVYNELTKVKYVTEGMRKPAFLSGEQKKAIVDLLFKTNR |
| | | KVTVKQLKEDYFKKIECFDSVEISGVEDRFNASLGTYHDLLKIIKDKD |
| | | FLDNEENEDILEDIVLTLTLFEDREMIEERLKTYAHLFDDKVMKQLK |
| | | RRRYTGWGRLSRKLINGIRDKQSGKTILDFLKSDGFANRNFMQLIHD |
| | | DSLTFKEDIQKAQVSGQGDSLHEHIANLAGSPAIKKGILQTVKVVDE |
| | | LVKVMGRHKPENIVIEMARENQTTQKGQKNSRERMKRIEEGIKELGS |
| | | QILKEHPVENTQLQNEKLYLYYLQNGRDMYVDQELDINRLSDYDVD |
| | | AIVPQSFLKDDSIDNKVLTRSDKNRGKSDNVPSEEVVKKMKNYWRQ |
| | | LLNAKLITQRKFDNLTKAERGGLSELDKAGFIKRQLVETRQITKHVA |
| | | QILDSRMNTKYDENDKLIREVKVITLKSKLVSDFRKDFQFYKVREIN |
| | | NYHHAHDAYLNAVVGTALIKKYPKLESEFVYGDYKVYDVRKMIAK |
| | | SEQEIGKATAKYFFYSNIMNFFKTEITLANGEIRKRPLIETNGETGEIV |
| | | WDKGRDFATVRKVLSMPQVNIVKKTEVQTGGFSKESILPKRNSDKLI |
| | | ARKKDWDPKKYGGFDSPTVAYSVLVVAKVEKGKSKKLKSVKELLG |
| | | ITIMERSSFEKNPIDFLEAKGYKEVKKDLIIKLPKYSLFELENGRKRML |
| | | ASAGELQKGNELALPSKYVNFLYLASHYEKLKGSPEDNEQKQLFVE |
| | | QHKHYLDEIIEQISEFSKRVILADANLDKVLSAYNKHRDKPIREQAEN |
| | | IIHLFTLTNLGAPAAFKYFDTTIDRKRYTSTKEVLDATLIHQSITGLYE |
| | | TRIDLSQLGGDPKKKRKVGGPSSGAPPPSGGSPAGSPTSTEEGTSESA |
| | | TPESGPGTSTEPSEGSAPGSPAGSPTSTEEGTSTEPSEGSAPGTSTEPSE |
| | | TGIEYQIPVSFKDVVVGFTQEEWHRLSPAQRALYRDVMLETYSNLVS |
| | | VGYEGTKPDVILRLEQEEAPWIGEAACPGCHCWED |
| 1030 | Cas-ZN736 | MGTPKKKRKVMDKKYSIGLAIGTNSVGWAVITDEYKVPSKKFKVLG |
| | | NTDRHSIKKNLIGALLFDSGETAEATRLKRTARRRYTRRKNRICYLQ |
| | | EIFSNEMAKVDDSFFHRLEESFLVEEDKKHERHPIFGNIVDEVAYHEK |
| | | YPTIYHLRKKLVDSTDKADLRLIYLALAHMIKFRGHFLIEGDLNPDNS |
| | | DVDKLFIQLVQTYNQLFEENPINASGVDAKAILSARLSKSRRLENLIA |
| | | QLPGEKKNGLFGNLIALSLGLTPNFKSNFDLAEDAKLQLSKDTYDDD |
| | | LDNLLAQIGDQYADLFLAAKNLSDAILLSDILRVNTEITKAPLSASMI |
| | | KRYDEHHQDLTLLKALVRQQLPEKYKEIFFDQSKNGYAGYIDGGAS |
| | | QEEFYKFIKPILEKMDGTEELLVKLNREDLLRKQRTFDNGSIPHQIHL |
| | | GELHAILRRQEDFYPFLKDNREKIEKILTFRIPYYVGPLARGNSRFAW |
| | | MTRKSEETITPWNFEEVVDKGASAQSFIERMTNFDKNLPNEKVLPKH |
| | | SLLYEYFTVYNELTKVKYVTEGMRKPAFLSGEQKKAIVDLLFKTNR |
| | | KVTVKQLKEDYFKKIECFDSVEISGVEDRFNASLGTYHDLLKIIKDKD |
| | | FLDNEENEDILEDIVLTLTLFEDREMIEERLKTYAHLFDDKVMKQLK |
| | | RRRYTGWGRLSRKLINGIRDKQSGKTILDFLKSDGFANRNFMQLIHD |
| | | DSLTFKEDIQKAQVSGQGDSLHEHIANLAGSPAIKKGILQTVKVVDE |
| | | LVKVMGRHKPENIVIEMARENQTTQKGQKNSRERMKRIEEGIKELGS |
| | | QILKEHPVENTQLQNEKLYLYYLQNGRDMYVDQELDINRLSDYDVD |
| | | AIVPQSFLKDDSIDNKVLTRSDKNRGKSDNVPSEEVVKKMKNYWRQ |
| | | LLNAKLITQRKFDNLTKAERGGLSELDKAGFIKRQLVETRQITKHVA |
| | | QILDSRMNTKYDENDKLIREVKVITLKSKLVSDFRKDFQFYKVREIN |
| | | NYHHAHDAYLNAVVGTALIKKYPKLESEFVYGDYKVYDVRKMIAK |
| | | SEQEIGKATAKYFFYSNIMNFFKTEITLANGEIRKRPLIETNGETGEIV |
| | | WDKGRDFATVRKVLSMPQVNIVKKTEVQTGGFSKESILPKRNSDKLI |
| | | ARKKDWDPKKYGGFDSPTVAYSVLVVAKVEKGKSKKLKSVKELLG |
| | | ITIMERSSFEKNPIDFLEAKGYKEVKKDLIIKLPKYSLFELENGRKRML |
| | | ASAGELQKGNELALPSKYVNFLYLASHYEKLKGSPEDNEQKQLFVE |
| | | QHKHYLDEIIEQISEFSKRVILADANLDKVLSAYNKHRDKPIREQAEN |
| | | IIHLFTLTNLGAPAAFKYFDTTIDRKRYTSTKEVLDATLIHQSITGLYE |
| | | TRIDLSQLGGDPKKKRKVGGPSSGAPPPSGGSPAGSPTSTEEGTSESA |
| | | TPESGPGTSTEPSEGSAPGSPAGSPTSTEEGTSTEPSEGSAPGTSTEPSE |
| | | TGGVLTFRDVAVEFSPEEWECLDSAQQRLYRDVMLENYGNLVSLGL |
| | | AIFKPDLMTCLEQRKEPWKVKRQEAVAKHPAGSFHF |
| 1031 | Cas-ZN577 | MGTPKKKRKVMDKKYSIGLAIGTNSVGWAVITDEYKVPSKKFKVLG |
| | | NTDRHSIKKNLIGALLFDSGETAEATRLKRTARRRYTRRKNRICYLQ |
| | | EIFSNEMAKVDDSFFHRLEESFLVEEDKKHERHPIFGNIVDEVAYHEK |
| | | YPTIYHLRKKLVDSTDKADLRLIYLALAHMIKFRGHFLIEGDLNPDNS |
| | | DVDKLFIQLVQTYNQLFEENPINASGVDAKAILSARLSKSRRLENLIA |
| | | QLPGEKKNGLFGNLIALSLGLTPNFKSNFDLAEDAKLQLSKDTYDDD |
| | | LDNLLAQIGDQYADLFLAAKNLSDAILLSDILRVNTEITKAPLSASMI |
| | | KRYDEHHQDLTLLKALVRQQLPEKYKEIFFDQSKNGYAGYIDGGAS |
| | | QEEFYKFIKPILEKMDGTEELLVKLNREDLLRKQRTFDNGSIPHQIHL |
| | | GELHAILRRQEDFYPFLKDNREKIEKILTFRIPYYVGPLARGNSRFAW |
| | | MTRKSEETITPWNFEEVVDKGASAQSFIERMTNFDKNLPNEKVLPKH |
| | | SLLYEYFTVYNELTKVKYVTEGMRKPAFLSGEQKKAIVDLLFKTNR |
| | | KVTVKQLKEDYFKKIECFDSVEISGVEDRFNASLGTYHDLLKIIKDKD |
| | | FLDNEENEDILEDIVLTLTLFEDREMIEERLKTYAHLFDDKVMKQLK |
| | | RRRYTGWGRLSRKLINGIRDKQSGKTILDFLKSDGFANRNFMQLIHD |
| | | DSLTFKEDIQKAQVSGQGDSLHEHIANLAGSPAIKKGILQTVKVVDE |
| | | LVKVMGRHKPENIVIEMARENQTTQKGQKNSRERMKRIEEGIKELGS |
| | | QILKEHPVENTQLQNEKLYLYYLQNGRDMYVDQELDINRLSDYDVD |
| | | AIVPQSFLKDDSIDNKVLTRSDKNRGKSDNVPSEEVVKKMKNYWRQ |
| | | LLNAKLITQRKFDNLTKAERGGLSELDKAGFIKRQLVETRQITKHVA |
| | | QILDSRMNTKYDENDKLIREVKVITLKSKLVSDFRKDFQFYKVREIN |
| | | NYHHAHDAYLNAVVGTALIKKYPKLESEFVYGDYKVYDVRKMIAK |
| | | SEQEIGKATAKYFFYSNIMNFFKTEITLANGEIRKRPLIETNGETGEIV |
| | | WDKGRDFATVRKVLSMPQVNIVKKTEVQTGGFSKESILPKRNSDKLI |
| | | ARKKDWDPKKYGGFDSPTVAYSVLVVAKVEKGKSKKLKSVKELLG |
| | | ITIMERSSFEKNPIDFLEAKGYKEVKKDLIIKLPKYSLFELENGRKRML |
| | | ASAGELQKGNELALPSKYVNFLYLASHYEKLKGSPEDNEQKQLFVE |
| | | QHKHYLDEIIEQISEFSKRVILADANLDKVLSAYNKHRDKPIREQAEN |
| | | IIHLFTLTNLGAPAAFKYFDTTIDRKRYTSTKEVLDATLIHQSITGLYE |
| | | TRIDLSQLGGDPKKKRKVGGPSSGAPPPSGGSPAGSPTSTEEGTSESA |
| | | TPESGPGTSTEPSEGSAPGSPAGSPTSTEEGTSTEPSEGSAPGTSTEPSE |
| | | TGNATIVMSVRREQGSSSGEGSLSFEDVAVGFTREEWQFLDQSQKVL |
| | | YKEVMLENYINLVSIGYRGTKPDSLFKLEQGEPPG |
| 1032 | Cas- | MGTPKKKRKVMDKKYSIGLAIGTNSVGWAVITDEYKVPSKKFKVLG |
| | SUMO1 | NTDRHSIKKNLIGALLFDSGETAEATRLKRTARRRYTRRKNRICYLQ |
| | | EIFSNEMAKVDDSFFHRLEESFLVEEDKKHERHPIFGNIVDEVAYHEK |
| | | YPTIYHLRKKLVDSTDKADLRLIYLALAHMIKFRGHFLIEGDLNPDNS |
| | | DVDKLFIQLVQTYNQLFEENPINASGVDAKAILSARLSKSRRLENLIA |
| | | QLPGEKKNGLFGNLIALSLGLTPNFKSNFDLAEDAKLQLSKDTYDDD |
| | | LDNLLAQIGDQYADLFLAAKNLSDAILLSDILRVNTEITKAPLSASMI |
| | | KRYDEHHQDLTLLKALVRQQLPEKYKEIFFDQSKNGYAGYIDGGAS |
| | | QEEFYKFIKPILEKMDGTEELLVKLNREDLLRKQRTFDNGSIPHQIHL |
| | | GELHAILRRQEDFYPFLKDNREKIEKILTFRIPYYVGPLARGNSRFAW |
| | | MTRKSEETITPWNFEEVVDKGASAQSFIERMTNFDKNLPNEKVLPKH |
| | | SLLYEYFTVYNELTKVKYVTEGMRKPAFLSGEQKKAIVDLLFKTNR |
| | | KVTVKQLKEDYFKKIECFDSVEISGVEDRFNASLGTYHDLLKIIKDKD |
| | | FLDNEENEDILEDIVLTLTLFEDREMIEERLKTYAHLFDDKVMKQLK |
| | | RRRYTGWGRLSRKLINGIRDKQSGKTILDFLKSDGFANRNFMQLIHD |
| | | DSLTFKEDIQKAQVSGQGDSLHEHIANLAGSPAIKKGILQTVKVVDE |
| | | LVKVMGRHKPENIVIEMARENQTTQKGQKNSRERMKRIEEGIKELGS |
| | | QILKEHPVENTQLQNEKLYLYYLQNGRDMYVDQELDINRLSDYDVD |
| | | AIVPQSFLKDDSIDNKVLTRSDKNRGKSDNVPSEEVVKKMKNYWRQ |
| | | LLNAKLITQRKFDNLTKAERGGLSELDKAGFIKRQLVETRQITKHVA |
| | | QILDSRMNTKYDENDKLIREVKVITLKSKLVSDFRKDFQFYKVREIN |
| | | NYHHAHDAYLNAVVGTALIKKYPKLESEFVYGDYKVYDVRKMIAK |
| | | SEQEIGKATAKYFFYSNIMNFFKTEITLANGEIRKRPLIETNGETGEIV |
| | | WDKGRDFATVRKVLSMPQVNIVKKTEVQTGGFSKESILPKRNSDKLI |
| | | ARKKDWDPKKYGGFDSPTVAYSVLVVAKVEKGKSKKLKSVKELLG |
| | | ITIMERSSFEKNPIDFLEAKGYKEVKKDLIIKLPKYSLFELENGRKRML |
| | | ASAGELQKGNELALPSKYVNFLYLASHYEKLKGSPEDNEQKQLFVE |
| | | QHKHYLDEIIEQISEFSKRVILADANLDKVLSAYNKHRDKPIREQAEN |
| | | IIHLFTLTNLGAPAAFKYFDTTIDRKRYTSTKEVLDATLIHQSITGLYE |
| | | TRIDLSQLGGDPKKKRKVGGPSSGAPPPSGGSPAGSPTSTEEGTSESA |
| | | TPESGPGTSTEPSEGSAPGSPAGSPTSTEEGTSTEPSEGSAPGTSTEPSE |
| | | TGEGEYIKLKVIGQDSSEIHFKVKMTTHLKKLKESYCQRQGVPMNSL |
| | | RFLFEGQRIADNHTPKELGMEEEDVIEVYQEQTGG |
| 1033 | Cas- | MGTPKKKRKVMDKKYSIGLAIGTNSVGWAVITDEYKVPSKKFKVLG |
| | SUMO3 | NTDRHSIKKNLIGALLFDSGETAEATRLKRTARRRYTRRKNRICYLQ |
| | | EIFSNEMAKVDDSFFHRLEESFLVEEDKKHERHPIFGNIVDEVAYHEK |
| | | YPTIYHLRKKLVDSTDKADLRLIYLALAHMIKFRGHFLIEGDLNPDNS |
| | | DVDKLFIQLVQTYNQLFEENPINASGVDAKAILSARLSKSRRLENLIA |
| | | QLPGEKKNGLFGNLIALSLGLTPNFKSNFDLAEDAKLQLSKDTYDDD |
| | | LDNLLAQIGDQYADLFLAAKNLSDAILLSDILRVNTEITKAPLSASMI |
| | | KRYDEHHQDLTLLKALVRQQLPEKYKEIFFDQSKNGYAGYIDGGAS |
| | | QEEFYKFIKPILEKMDGTEELLVKLNREDLLRKQRTFDNGSIPHQIHL |
| | | GELHAILRRQEDFYPFLKDNREKIEKILTFRIPYYVGPLARGNSRFAW |
| | | MTRKSEETITPWNFEEVVDKGASAQSFIERMTNFDKNLPNEKVLPKH |
| | | SLLYEYFTVYNELTKVKYVTEGMRKPAFLSGEQKKAIVDLLFKTNR |
| | | KVTVKQLKEDYFKKIECFDSVEISGVEDRFNASLGTYHDLLKIIKDKD |
| | | FLDNEENEDILEDIVLTLTLFEDREMIEERLKTYAHLFDDKVMKQLK |
| | | RRRYTGWGRLSRKLINGIRDKQSGKTILDFLKSDGFANRNFMQLIHD |
| | | DSLTFKEDIQKAQVSGQGDSLHEHIANLAGSPAIKKGILQTVKVVDE |
| | | LVKVMGRHKPENIVIEMARENQTTQKGQKNSRERMKRIEEGIKELGS |
| | | QILKEHPVENTQLQNEKLYLYYLQNGRDMYVDQELDINRLSDYDVD |
| | | AIVPQSFLKDDSIDNKVLTRSDKNRGKSDNVPSEEVVKKMKNYWRQ |
| | | LLNAKLITQRKFDNLTKAERGGLSELDKAGFIKRQLVETRQITKHVA |
| | | QILDSRMNTKYDENDKLIREVKVITLKSKLVSDFRKDFQFYKVREIN |
| | | NYHHAHDAYLNAVVGTALIKKYPKLESEFVYGDYKVYDVRKMIAK |
| | | SEQEIGKATAKYFFYSNIMNFFKTEITLANGEIRKRPLIETNGETGEIV |
| | | WDKGRDFATVRKVLSMPQVNIVKKTEVQTGGFSKESILPKRNSDKLI |
| | | ARKKDWDPKKYGGFDSPTVAYSVLVVAKVEKGKSKKLKSVKELLG |
| | | ITIMERSSFEKNPIDFLEAKGYKEVKKDLIIKLPKYSLFELENGRKRML |
| | | ASAGELQKGNELALPSKYVNFLYLASHYEKLKGSPEDNEQKQLFVE |
| | | QHKHYLDEIIEQISEFSKRVILADANLDKVLSAYNKHRDKPIREQAEN |
| | | IIHLFTLTNLGAPAAFKYFDTTIDRKRYTSTKEVLDATLIHQSITGLYE |
| | | TRIDLSQLGGDPKKKRKVGGPSSGAPPPSGGSPAGSPTSTEEGTSESA |
| | | TPESGPGTSTEPSEGSAPGSPAGSPTSTEEGTSTEPSEGSAPGTSTEPSE |
| | | TGENDHINLKVAGQDGSVVQFKIKRHTPLSKLMKAYCERQGLSMRQ |
| | | IRFRFDGQPINETDTPAQLEMEDEDTIDVFQQQTGG |
| 1034 | Cas-MPP8 | MGTPKKKRKVMDKKYSIGLAIGTNSVGWAVITDEYKVPSKKFKVLG |
| | | NTDRHSIKKNLIGALLFDSGETAEATRLKRTARRRYTRRKNRICYLQ |
| | | EIFSNEMAKVDDSFFHRLEESFLVEEDKKHERHPIFGNIVDEVAYHEK |
| | | YPTIYHLRKKLVDSTDKADLRLIYLALAHMIKFRGHFLIEGDLNPDNS |
| | | DVDKLFIQLVQTYNQLFEENPINASGVDAKAILSARLSKSRRLENLIA |
| | | QLPGEKKNGLFGNLIALSLGLTPNFKSNFDLAEDAKLQLSKDTYDDD |
| | | LDNLLAQIGDQYADLFLAAKNLSDAILLSDILRVNTEITKAPLSASMI |
| | | KRYDEHHQDLTLLKALVRQQLPEKYKEIFFDQSKNGYAGYIDGGAS |
| | | QEEFYKFIKPILEKMDGTEELLVKLNREDLLRKQRTFDNGSIPHQIHL |
| | | GELHAILRRQEDFYPFLKDNREKIEKILTFRIPYYVGPLARGNSRFAW |
| | | MTRKSEETITPWNFEEVVDKGASAQSFIERMTNFDKNLPNEKVLPKH |
| | | SLLYEYFTVYNELTKVKYVTEGMRKPAFLSGEQKKAIVDLLFKTNR |
| | | KVTVKQLKEDYFKKIECFDSVEISGVEDRFNASLGTYHDLLKIIKDKD |
| | | FLDNEENEDILEDIVLTLTLFEDREMIEERLKTYAHLFDDKVMKQLK |
| | | RRRYTGWGRLSRKLINGIRDKQSGKTILDFLKSDGFANRNFMQLIHD |
| | | DSLTFKEDIQKAQVSGQGDSLHEHIANLAGSPAIKKGILQTVKVVDE |
| | | LVKVMGRHKPENIVIEMARENQTTQKGQKNSRERMKRIEEGIKELGS |
| | | QILKEHPVENTQLQNEKLYLYYLQNGRDMYVDQELDINRLSDYDVD |
| | | AIVPQSFLKDDSIDNKVLTRSDKNRGKSDNVPSEEVVKKMKNYWRQ |
| | | LLNAKLITQRKFDNLTKAERGGLSELDKAGFIKRQLVETRQITKHVA |
| | | QILDSRMNTKYDENDKLIREVKVITLKSKLVSDFRKDFQFYKVREIN |
| | | NYHHAHDAYLNAVVGTALIKKYPKLESEFVYGDYKVYDVRKMIAK |
| | | SEQEIGKATAKYFFYSNIMNFFKTEITLANGEIRKRPLIETNGETGEIV |
| | | WDKGRDFATVRKVLSMPQVNIVKKTEVQTGGFSKESILPKRNSDKLI |
| | | ARKKDWDPKKYGGFDSPTVAYSVLVVAKVEKGKSKKLKSVKELLG |
| | | ITIMERSSFEKNPIDFLEAKGYKEVKKDLIIKLPKYSLFELENGRKRML |
| | | ASAGELQKGNELALPSKYVNFLYLASHYEKLKGSPEDNEQKQLFVE |
| | | QHKHYLDEIIEQISEFSKRVILADANLDKVLSAYNKHRDKPIREQAEN |
| | | IIHLFTLTNLGAPAAFKYFDTTIDRKRYTSTKEVLDATLIHQSITGLYE |
| | | TRIDLSQLGGDPKKKRKVGGPSSGAPPPSGGSPAGSPTSTEEGTSESA |
| | | TPESGPGTSTEPSEGSAPGSPAGSPTSTEEGTSTEPSEGSAPGTSTEPSE |
| | | TGAEAFGDSEEDGEDVFEVEKILDMKTEGGKVLYKVRWKGYTSDD |
| | | DTWEPEIHLEDCKEVLLEFRKKIAENKAKAVRKDIQR |
| 1035 | Cas-RYBP | MGTPKKKRKVMDKKYSIGLAIGTNSVGWAVITDEYKVPSKKFKVLG |
| | | NTDRHSIKKNLIGALLFDSGETAEATRLKRTARRRYTRRKNRICYLQ |
| | | EIFSNEMAKVDDSFFHRLEESFLVEEDKKHERHPIFGNIVDEVAYHEK |
| | | YPTIYHLRKKLVDSTDKADLRLIYLALAHMIKFRGHFLIEGDLNPDNS |
| | | DVDKLFIQLVQTYNQLFEENPINASGVDAKAILSARLSKSRRLENLIA |
| | | QLPGEKKNGLFGNLIALSLGLTPNFKSNFDLAEDAKLQLSKDTYDDD |
| | | LDNLLAQIGDQYADLFLAAKNLSDAILLSDILRVNTEITKAPLSASMI |
| | | KRYDEHHQDLTLLKALVRQQLPEKYKEIFFDQSKNGYAGYIDGGAS |
| | | QEEFYKFIKPILEKMDGTEELLVKLNREDLLRKQRTFDNGSIPHQIHL |
| | | GELHAILRRQEDFYPFLKDNREKIEKILTFRIPYYVGPLARGNSRFAW |
| | | MTRKSEETITPWNFEEVVDKGASAQSFIERMTNFDKNLPNEKVLPKH |
| | | SLLYEYFTVYNELTKVKYVTEGMRKPAFLSGEQKKAIVDLLFKTNR |
| | | KVTVKQLKEDYFKKIECFDSVEISGVEDRFNASLGTYHDLLKIIKDKD |
| | | FLDNEENEDILEDIVLTLTLFEDREMIEERLKTYAHLFDDKVMKQLK |
| | | RRRYTGWGRLSRKLINGIRDKQSGKTILDFLKSDGFANRNFMQLIHD |
| | | DSLTFKEDIQKAQVSGQGDSLHEHIANLAGSPAIKKGILQTVKVVDE |
| | | LVKVMGRHKPENIVIEMARENQTTQKGQKNSRERMKRIEEGIKELGS |
| | | QILKEHPVENTQLQNEKLYLYYLQNGRDMYVDQELDINRLSDYDVD |
| | | AIVPQSFLKDDSIDNKVLTRSDKNRGKSDNVPSEEVVKKMKNYWRQ |
| | | LLNAKLITQRKFDNLTKAERGGLSELDKAGFIKRQLVETRQITKHVA |
| | | QILDSRMNTKYDENDKLIREVKVITLKSKLVSDFRKDFQFYKVREIN |
| | | NYHHAHDAYLNAVVGTALIKKYPKLESEFVYGDYKVYDVRKMIAK |
| | | SEQEIGKATAKYFFYSNIMNFFKTEITLANGEIRKRPLIETNGETGEIV |
| | | WDKGRDFATVRKVLSMPQVNIVKKTEVQTGGFSKESILPKRNSDKLI |
| | | ARKKDWDPKKYGGFDSPTVAYSVLVVAKVEKGKSKKLKSVKELLG |
| | | ITIMERSSFEKNPIDFLEAKGYKEVKKDLIIKLPKYSLFELENGRKRML |
| | | ASAGELQKGNELALPSKYVNFLYLASHYEKLKGSPEDNEQKQLFVE |
| | | QHKHYLDEIIEQISEFSKRVILADANLDKVLSAYNKHRDKPIREQAEN |
| | | IIHLFTLTNLGAPAAFKYFDTTIDRKRYTSTKEVLDATLIHQSITGLYE |
| | | TRIDLSQLGGDPKKKRKVGGPSSGAPPPSGGSPAGSPTSTEEGTSESA |
| | | TPESGPGTSTEPSEGSAPGSPAGSPTSTEEGTSTEPSEGSAPGTSTEPSE |
| | | TGPSEANSIQSANATTKTSETNHTSRPRLKNVDRSTAQQLAVTVGNV |
| | | TVIITDFKEKTRSSSTSSSTVTSSAGSEQQNQSSS |
| 1036 | Cas-YAF2 | MGTPKKKRKVMDKKYSIGLAIGTNSVGWAVITDEYKVPSKKFKVLG |
| | | NTDRHSIKKNLIGALLFDSGETAEATRLKRTARRRYTRRKNRICYLQ |
| | | EIFSNEMAKVDDSFFHRLEESFLVEEDKKHERHPIFGNIVDEVAYHEK |
| | | YPTIYHLRKKLVDSTDKADLRLIYLALAHMIKFRGHFLIEGDLNPDNS |
| | | DVDKLFIQLVQTYNQLFEENPINASGVDAKAILSARLSKSRRLENLIA |
| | | QLPGEKKNGLFGNLIALSLGLTPNFKSNFDLAEDAKLQLSKDTYDDD |
| | | LDNLLAQIGDQYADLFLAAKNLSDAILLSDILRVNTEITKAPLSASMI |
| | | KRYDEHHQDLTLLKALVRQQLPEKYKEIFFDQSKNGYAGYIDGGAS |
| | | QEEFYKFIKPILEKMDGTEELLVKLNREDLLRKQRTFDNGSIPHQIHL |
| | | GELHAILRRQEDFYPFLKDNREKIEKILTFRIPYYVGPLARGNSRFAW |
| | | MTRKSEETITPWNFEEVVDKGASAQSFIERMTNFDKNLPNEKVLPKH |
| | | SLLYEYFTVYNELTKVKYVTEGMRKPAFLSGEQKKAIVDLLFKTNR |
| | | KVTVKQLKEDYFKKIECFDSVEISGVEDRFNASLGTYHDLLKIIKDKD |
| | | FLDNEENEDILEDIVLTLTLFEDREMIEERLKTYAHLFDDKVMKQLK |
| | | RRRYTGWGRLSRKLINGIRDKQSGKTILDFLKSDGFANRNFMQLIHD |
| | | DSLTFKEDIQKAQVSGQGDSLHEHIANLAGSPAIKKGILQTVKVVDE |
| | | LVKVMGRHKPENIVIEMARENQTTQKGQKNSRERMKRIEEGIKELGS |
| | | QILKEHPVENTQLQNEKLYLYYLQNGRDMYVDQELDINRLSDYDVD |
| | | AIVPQSFLKDDSIDNKVLTRSDKNRGKSDNVPSEEVVKKMKNYWRQ |
| | | LLNAKLITQRKFDNLTKAERGGLSELDKAGFIKRQLVETRQITKHVA |
| | | QILDSRMNTKYDENDKLIREVKVITLKSKLVSDFRKDFQFYKVREIN |
| | | NYHHAHDAYLNAVVGTALIKKYPKLESEFVYGDYKVYDVRKMIAK |
| | | SEQEIGKATAKYFFYSNIMNFFKTEITLANGEIRKRPLIETNGETGEIV |
| | | WDKGRDFATVRKVLSMPQVNIVKKTEVQTGGFSKESILPKRNSDKLI |
| | | ARKKDWDPKKYGGFDSPTVAYSVLVVAKVEKGKSKKLKSVKELLG |
| | | ITIMERSSFEKNPIDFLEAKGYKEVKKDLIIKLPKYSLFELENGRKRML |
| | | ASAGELQKGNELALPSKYVNFLYLASHYEKLKGSPEDNEQKQLFVE |
| | | QHKHYLDEIIEQISEFSKRVILADANLDKVLSAYNKHRDKPIREQAEN |
| | | IIHLFTLTNLGAPAAFKYFDTTIDRKRYTSTKEVLDATLIHQSITGLYE |
| | | TRIDLSQLGGDPKKKRKVGGPSSGAPPPSGGSPAGSPTSTEEGTSESA |
| | | TPESGPGTSTEPSEGSAPGSPAGSPTSTEEGTSTEPSEGSAPGTSTEPSE |
| | | TGKDKVEKEKSEKETTSKKNSHKKTRPRLKNVDRSSAQHLEVTVGD |
| | | LTVIITDFKEKTKSPPASSAASADQHSQSGSSSDNT |
| 1037 | Cas- | MGTPKKKRKVMDKKYSIGLAIGTNSVGWAVITDEYKVPSKKFKVLG |
| | SUMO5 | NTDRHSIKKNLIGALLFDSGETAEATRLKRTARRRYTRRKNRICYLQ |
| | | EIFSNEMAKVDDSFFHRLEESFLVEEDKKHERHPIFGNIVDEVAYHEK |
| | | YPTIYHLRKKLVDSTDKADLRLIYLALAHMIKFRGHFLIEGDLNPDNS |
| | | DVDKLFIQLVQTYNQLFEENPINASGVDAKAILSARLSKSRRLENLIA |
| | | QLPGEKKNGLFGNLIALSLGLTPNFKSNFDLAEDAKLQLSKDTYDDD |
| | | LDNLLAQIGDQYADLFLAAKNLSDAILLSDILRVNTEITKAPLSASMI |
| | | KRYDEHHQDLTLLKALVRQQLPEKYKEIFFDQSKNGYAGYIDGGAS |
| | | QEEFYKFIKPILEKMDGTEELLVKLNREDLLRKQRTFDNGSIPHQIHL |
| | | GELHAILRRQEDFYPFLKDNREKIEKILTFRIPYYVGPLARGNSRFAW |
| | | MTRKSEETITPWNFEEVVDKGASAQSFIERMTNFDKNLPNEKVLPKH |
| | | SLLYEYFTVYNELTKVKYVTEGMRKPAFLSGEQKKAIVDLLFKTNR |
| | | KVTVKQLKEDYFKKIECFDSVEISGVEDRFNASLGTYHDLLKIIKDKD |
| | | FLDNEENEDILEDIVLTLTLFEDREMIEERLKTYAHLFDDKVMKQLK |
| | | RRRYTGWGRLSRKLINGIRDKQSGKTILDFLKSDGFANRNFMQLIHD |
| | | DSLTFKEDIQKAQVSGQGDSLHEHIANLAGSPAIKKGILQTVKVVDE |
| | | LVKVMGRHKPENIVIEMARENQTTQKGQKNSRERMKRIEEGIKELGS |
| | | QILKEHPVENTQLQNEKLYLYYLQNGRDMYVDQELDINRLSDYDVD |
| | | AIVPQSFLKDDSIDNKVLTRSDKNRGKSDNVPSEEVVKKMKNYWRQ |
| | | LLNAKLITQRKFDNLTKAERGGLSELDKAGFIKRQLVETRQITKHVA |
| | | QILDSRMNTKYDENDKLIREVKVITLKSKLVSDFRKDFQFYKVREIN |
| | | NYHHAHDAYLNAVVGTALIKKYPKLESEFVYGDYKVYDVRKMIAK |
| | | SEQEIGKATAKYFFYSNIMNFFKTEITLANGEIRKRPLIETNGETGEIV |
| | | WDKGRDFATVRKVLSMPQVNIVKKTEVQTGGFSKESILPKRNSDKLI |
| | | ARKKDWDPKKYGGFDSPTVAYSVLVVAKVEKGKSKKLKSVKELLG |
| | | ITIMERSSFEKNPIDFLEAKGYKEVKKDLIIKLPKYSLFELENGRKRML |
| | | ASAGELQKGNELALPSKYVNFLYLASHYEKLKGSPEDNEQKQLFVE |
| | | QHKHYLDEIIEQISEFSKRVILADANLDKVLSAYNKHRDKPIREQAEN |
| | | IIHLFTLTNLGAPAAFKYFDTTIDRKRYTSTKEVLDATLIHQSITGLYE |
| | | TRIDLSQLGGDPKKKRKVGGPSSGAPPPSGGSPAGSPTSTEEGTSESA |
| | | TPESGPGTSTEPSEGSAPGSPAGSPTSTEEGTSTEPSEGSAPGTSTEPSE |
| | | TGKDEDIKLRVIGQDSSEIHFKVKMTTPLKKLKKSYCQRQGVPVNSL |
| | | RFLFEGQRIADNHTPEELGMEEEDVIEVYQEQIGG |
| 1038 | Cas-CBX4 | MGTPKKKRKVMDKKYSIGLAIGTNSVGWAVITDEYKVPSKKFKVLG |
| | | NTDRHSIKKNLIGALLFDSGETAEATRLKRTARRRYTRRKNRICYLQ |
| | | EIFSNEMAKVDDSFFHRLEESFLVEEDKKHERHPIFGNIVDEVAYHEK |
| | | YPTIYHLRKKLVDSTDKADLRLIYLALAHMIKFRGHFLIEGDLNPDNS |
| | | DVDKLFIQLVQTYNQLFEENPINASGVDAKAILSARLSKSRRLENLIA |
| | | QLPGEKKNGLFGNLIALSLGLTPNFKSNFDLAEDAKLQLSKDTYDDD |
| | | LDNLLAQIGDQYADLFLAAKNLSDAILLSDILRVNTEITKAPLSASMI |
| | | KRYDEHHQDLTLLKALVRQQLPEKYKEIFFDQSKNGYAGYIDGGAS |
| | | QEEFYKFIKPILEKMDGTEELLVKLNREDLLRKQRTFDNGSIPHQIHL |
| | | GELHAILRRQEDFYPFLKDNREKIEKILTFRIPYYVGPLARGNSRFAW |
| | | MTRKSEETITPWNFEEVVDKGASAQSFIERMTNFDKNLPNEKVLPKH |
| | | SLLYEYFTVYNELTKVKYVTEGMRKPAFLSGEQKKAIVDLLFKTNR |
| | | KVTVKQLKEDYFKKIECFDSVEISGVEDRFNASLGTYHDLLKIIKDKD |
| | | FLDNEENEDILEDIVLTLTLFEDREMIEERLKTYAHLFDDKVMKQLK |
| | | RRRYTGWGRLSRKLINGIRDKQSGKTILDFLKSDGFANRNFMQLIHD |
| | | DSLTFKEDIQKAQVSGQGDSLHEHIANLAGSPAIKKGILQTVKVVDE |
| | | LVKVMGRHKPENIVIEMARENQTTQKGQKNSRERMKRIEEGIKELGS |
| | | QILKEHPVENTQLQNEKLYLYYLQNGRDMYVDQELDINRLSDYDVD |
| | | AIVPQSFLKDDSIDNKVLTRSDKNRGKSDNVPSEEVVKKMKNYWRQ |
| | | LLNAKLITQRKFDNLTKAERGGLSELDKAGFIKRQLVETRQITKHVA |
| | | QILDSRMNTKYDENDKLIREVKVITLKSKLVSDFRKDFQFYKVREIN |
| | | NYHHAHDAYLNAVVGTALIKKYPKLESEFVYGDYKVYDVRKMIAK |
| | | SEQEIGKATAKYFFYSNIMNFFKTEITLANGEIRKRPLIETNGETGEIV |
| | | WDKGRDFATVRKVLSMPQVNIVKKTEVQTGGFSKESILPKRNSDKLI |
| | | ARKKDWDPKKYGGFDSPTVAYSVLVVAKVEKGKSKKLKSVKELLG |
| | | ITIMERSSFEKNPIDFLEAKGYKEVKKDLIIKLPKYSLFELENGRKRML |
| | | ASAGELQKGNELALPSKYVNFLYLASHYEKLKGSPEDNEQKQLFVE |
| | | QHKHYLDEIIEQISEFSKRVILADANLDKVLSAYNKHRDKPIREQAEN |
| | | IIHLFTLTNLGAPAAFKYFDTTIDRKRYTSTKEVLDATLIHQSITGLYE |
| | | TRIDLSQLGGDPKKKRKVGGPSSGAPPPSGGSPAGSPTSTEEGTSESA |
| | | TPESGPGTSTEPSEGSAPGSPAGSPTSTEEGTSTEPSEGSAPGTSTEPSE |
| | | TGRSEAGEPPSSLQVKPETPASAAVAVAAAAAPTTTAEKPPAEAQDE |
| | | PAESLSEFKPFFGNIIITDVTANCLTVTFKEYVTV |
| 1039 | Cas- | MGTPKKKRKVMDKKYSIGLAIGTNSVGWAVITDEYKVPSKKFKVLG |
| | PCGF2 | NTDRHSIKKNLIGALLFDSGETAEATRLKRTARRRYTRRKNRICYLQ |
| | | EIFSNEMAKVDDSFFHRLEESFLVEEDKKHERHPIFGNIVDEVAYHEK |
| | | YPTIYHLRKKLVDSTDKADLRLIYLALAHMIKFRGHFLIEGDLNPDNS |
| | | DVDKLFIQLVQTYNQLFEENPINASGVDAKAILSARLSKSRRLENLIA |
| | | QLPGEKKNGLFGNLIALSLGLTPNFKSNFDLAEDAKLQLSKDTYDDD |
| | | LDNLLAQIGDQYADLFLAAKNLSDAILLSDILRVNTEITKAPLSASMI |
| | | KRYDEHHQDLTLLKALVRQQLPEKYKEIFFDQSKNGYAGYIDGGAS |
| | | QEEFYKFIKPILEKMDGTEELLVKLNREDLLRKQRTFDNGSIPHQIHL |
| | | GELHAILRRQEDFYPFLKDNREKIEKILTFRIPYYVGPLARGNSRFAW |
| | | MTRKSEETITPWNFEEVVDKGASAQSFIERMTNFDKNLPNEKVLPKH |
| | | SLLYEYFTVYNELTKVKYVTEGMRKPAFLSGEQKKAIVDLLFKTNR |
| | | KVTVKQLKEDYFKKIECFDSVEISGVEDRFNASLGTYHDLLKIIKDKD |
| | | FLDNEENEDILEDIVLTLTLFEDREMIEERLKTYAHLFDDKVMKQLK |
| | | RRRYTGWGRLSRKLINGIRDKQSGKTILDFLKSDGFANRNFMQLIHD |
| | | DSLTFKEDIQKAQVSGQGDSLHEHIANLAGSPAIKKGILQTVKVVDE |
| | | LVKVMGRHKPENIVIEMARENQTTQKGQKNSRERMKRIEEGIKELGS |
| | | QILKEHPVENTQLQNEKLYLYYLQNGRDMYVDQELDINRLSDYDVD |
| | | AIVPQSFLKDDSIDNKVLTRSDKNRGKSDNVPSEEVVKKMKNYWRQ |
| | | LLNAKLITQRKFDNLTKAERGGLSELDKAGFIKRQLVETRQITKHVA |
| | | QILDSRMNTKYDENDKLIREVKVITLKSKLVSDFRKDFQFYKVREIN |
| | | NYHHAHDAYLNAVVGTALIKKYPKLESEFVYGDYKVYDVRKMIAK |
| | | SEQEIGKATAKYFFYSNIMNFFKTEITLANGEIRKRPLIETNGETGEIV |
| | | WDKGRDFATVRKVLSMPQVNIVKKTEVQTGGFSKESILPKRNSDKLI |
| | | ARKKDWDPKKYGGFDSPTVAYSVLVVAKVEKGKSKKLKSVKELLG |
| | | ITIMERSSFEKNPIDFLEAKGYKEVKKDLIIKLPKYSLFELENGRKRML |
| | | ASAGELQKGNELALPSKYVNFLYLASHYEKLKGSPEDNEQKQLFVE |
| | | QHKHYLDEIIEQISEFSKRVILADANLDKVLSAYNKHRDKPIREQAEN |
| | | IIHLFTLTNLGAPAAFKYFDTTIDRKRYTSTKEVLDATLIHQSITGLYE |
| | | TRIDLSQLGGDPKKKRKVGGPSSGAPPPSGGSPAGSPTSTEEGTSESA |
| | | TPESGPGTSTEPSEGSAPGSPAGSPTSTEEGTSTEPSEGSAPGTSTEPSE |
| | | TGHRTTRIKITELNPHLMCALCGGYFIDATTIVECLHSFCKTCIVRYLE |
| | | TNKYCPMCDVQVHKTRPLLSIRSDKTLQDIVYK |
| 1040 | Cas-CDY2 | MGTPKKKRKVMDKKYSIGLAIGTNSVGWAVITDEYKVPSKKFKVLG |
| | | NTDRHSIKKNLIGALLFDSGETAEATRLKRTARRRYTRRKNRICYLQ |
| | | EIFSNEMAKVDDSFFHRLEESFLVEEDKKHERHPIFGNIVDEVAYHEK |
| | | YPTIYHLRKKLVDSTDKADLRLIYLALAHMIKFRGHFLIEGDLNPDNS |
| | | DVDKLFIQLVQTYNQLFEENPINASGVDAKAILSARLSKSRRLENLIA |
| | | QLPGEKKNGLFGNLIALSLGLTPNFKSNFDLAEDAKLQLSKDTYDDD |
| | | LDNLLAQIGDQYADLFLAAKNLSDAILLSDILRVNTEITKAPLSASMI |
| | | KRYDEHHQDLTLLKALVRQQLPEKYKEIFFDQSKNGYAGYIDGGAS |
| | | QEEFYKFIKPILEKMDGTEELLVKLNREDLLRKQRTFDNGSIPHQIHL |
| | | GELHAILRRQEDFYPFLKDNREKIEKILTFRIPYYVGPLARGNSRFAW |
| | | MTRKSEETITPWNFEEVVDKGASAQSFIERMTNFDKNLPNEKVLPKH |
| | | SLLYEYFTVYNELTKVKYVTEGMRKPAFLSGEQKKAIVDLLFKTNR |
| | | KVTVKQLKEDYFKKIECFDSVEISGVEDRFNASLGTYHDLLKIIKDKD |
| | | FLDNEENEDILEDIVLTLTLFEDREMIEERLKTYAHLFDDKVMKQLK |
| | | RRRYTGWGRLSRKLINGIRDKQSGKTILDFLKSDGFANRNFMQLIHD |
| | | DSLTFKEDIQKAQVSGQGDSLHEHIANLAGSPAIKKGILQTVKVVDE |
| | | LVKVMGRHKPENIVIEMARENQTTQKGQKNSRERMKRIEEGIKELGS |
| | | QILKEHPVENTQLQNEKLYLYYLQNGRDMYVDQELDINRLSDYDVD |
| | | AIVPQSFLKDDSIDNKVLTRSDKNRGKSDNVPSEEVVKKMKNYWRQ |
| | | LLNAKLITQRKFDNLTKAERGGLSELDKAGFIKRQLVETRQITKHVA |
| | | QILDSRMNTKYDENDKLIREVKVITLKSKLVSDFRKDFQFYKVREIN |
| | | NYHHAHDAYLNAVVGTALIKKYPKLESEFVYGDYKVYDVRKMIAK |
| | | SEQEIGKATAKYFFYSNIMNFFKTEITLANGEIRKRPLIETNGETGEIV |
| | | WDKGRDFATVRKVLSMPQVNIVKKTEVQTGGFSKESILPKRNSDKLI |
| | | ARKKDWDPKKYGGFDSPTVAYSVLVVAKVEKGKSKKLKSVKELLG |
| | | ITIMERSSFEKNPIDFLEAKGYKEVKKDLIIKLPKYSLFELENGRKRML |
| | | ASAGELQKGNELALPSKYVNFLYLASHYEKLKGSPEDNEQKQLFVE |
| | | QHKHYLDEIIEQISEFSKRVILADANLDKVLSAYNKHRDKPIREQAEN |
| | | IIHLFTLTNLGAPAAFKYFDTTIDRKRYTSTKEVLDATLIHQSITGLYE |
| | | TRIDLSQLGGDPKKKRKVGGPSSGAPPPSGGSPAGSPTSTEEGTSESA |
| | | TPESGPGTSTEPSEGSAPGSPAGSPTSTEEGTSTEPSEGSAPGTSTEPSE |
| | | TGASQEFEVEAIVDKRQDKNGNTQYLVRWKGYDKQDDTWEPEQHL |
| | | MNCEKCVHDFNRRQTEKQKKLTWTTTSRIFSNNARRR |
| 1041 | Cas- | MGTPKKKRKVMDKKYSIGLAIGTNSVGWAVITDEYKVPSKKFKVLG |
| | CDYL2 | NTDRHSIKKNLIGALLFDSGETAEATRLKRTARRRYTRRKNRICYLQ |
| | | EIFSNEMAKVDDSFFHRLEESFLVEEDKKHERHPIFGNIVDEVAYHEK |
| | | YPTIYHLRKKLVDSTDKADLRLIYLALAHMIKFRGHFLIEGDLNPDNS |
| | | DVDKLFIQLVQTYNQLFEENPINASGVDAKAILSARLSKSRRLENLIA |
| | | QLPGEKKNGLFGNLIALSLGLTPNFKSNFDLAEDAKLQLSKDTYDDD |
| | | LDNLLAQIGDQYADLFLAAKNLSDAILLSDILRVNTEITKAPLSASMI |
| | | KRYDEHHQDLTLLKALVRQQLPEKYKEIFFDQSKNGYAGYIDGGAS |
| | | QEEFYKFIKPILEKMDGTEELLVKLNREDLLRKQRTFDNGSIPHQIHL |
| | | GELHAILRRQEDFYPFLKDNREKIEKILTFRIPYYVGPLARGNSRFAW |
| | | MTRKSEETITPWNFEEVVDKGASAQSFIERMTNFDKNLPNEKVLPKH |
| | | SLLYEYFTVYNELTKVKYVTEGMRKPAFLSGEQKKAIVDLLFKTNR |
| | | KVTVKQLKEDYFKKIECFDSVEISGVEDRFNASLGTYHDLLKIIKDKD |
| | | FLDNEENEDILEDIVLTLTLFEDREMIEERLKTYAHLFDDKVMKQLK |
| | | RRRYTGWGRLSRKLINGIRDKQSGKTILDFLKSDGFANRNFMQLIHD |
| | | DSLTFKEDIQKAQVSGQGDSLHEHIANLAGSPAIKKGILQTVKVVDE |
| | | LVKVMGRHKPENIVIEMARENQTTQKGQKNSRERMKRIEEGIKELGS |
| | | QILKEHPVENTQLQNEKLYLYYLQNGRDMYVDQELDINRLSDYDVD |
| | | AIVPQSFLKDDSIDNKVLTRSDKNRGKSDNVPSEEVVKKMKNYWRQ |
| | | LLNAKLITQRKFDNLTKAERGGLSELDKAGFIKRQLVETRQITKHVA |
| | | QILDSRMNTKYDENDKLIREVKVITLKSKLVSDFRKDFQFYKVREIN |
| | | NYHHAHDAYLNAVVGTALIKKYPKLESEFVYGDYKVYDVRKMIAK |
| | | SEQEIGKATAKYFFYSNIMNFFKTEITLANGEIRKRPLIETNGETGEIV |
| | | WDKGRDFATVRKVLSMPQVNIVKKTEVQTGGFSKESILPKRNSDKLI |
| | | ARKKDWDPKKYGGFDSPTVAYSVLVVAKVEKGKSKKLKSVKELLG |
| | | ITIMERSSFEKNPIDFLEAKGYKEVKKDLIIKLPKYSLFELENGRKRML |
| | | ASAGELQKGNELALPSKYVNFLYLASHYEKLKGSPEDNEQKQLFVE |
| | | QHKHYLDEIIEQISEFSKRVILADANLDKVLSAYNKHRDKPIREQAEN |
| | | IIHLFTLTNLGAPAAFKYFDTTIDRKRYTSTKEVLDATLIHQSITGLYE |
| | | TRIDLSQLGGDPKKKRKVGGPSSGAPPPSGGSPAGSPTSTEEGTSESA |
| | | TPESGPGTSTEPSEGSAPGSPAGSPTSTEEGTSTEPSEGSAPGTSTEPSE |
| | | TGASGDLYEVERIVDKRKNKKGKWEYLIRWKGYGSTEDTWEPEHH |
| | | LLHCEEFIDEFNGLHMSKDKRIKSGKQSSTSKLLRDS |
| 1042 | Cas- | MGTPKKKRKVMDKKYSIGLAIGTNSVGWAVITDEYKVPSKKFKVLG |
| | HERC2 | NTDRHSIKKNLIGALLFDSGETAEATRLKRTARRRYTRRKNRICYLQ |
| | | EIFSNEMAKVDDSFFHRLEESFLVEEDKKHERHPIFGNIVDEVAYHEK |
| | | YPTIYHLRKKLVDSTDKADLRLIYLALAHMIKFRGHFLIEGDLNPDNS |
| | | DVDKLFIQLVQTYNQLFEENPINASGVDAKAILSARLSKSRRLENLIA |
| | | QLPGEKKNGLFGNLIALSLGLTPNFKSNFDLAEDAKLQLSKDTYDDD |
| | | LDNLLAQIGDQYADLFLAAKNLSDAILLSDILRVNTEITKAPLSASMI |
| | | KRYDEHHQDLTLLKALVRQQLPEKYKEIFFDQSKNGYAGYIDGGAS |
| | | QEEFYKFIKPILEKMDGTEELLVKLNREDLLRKQRTFDNGSIPHQIHL |
| | | GELHAILRRQEDFYPFLKDNREKIEKILTFRIPYYVGPLARGNSRFAW |
| | | MTRKSEETITPWNFEEVVDKGASAQSFIERMTNFDKNLPNEKVLPKH |
| | | SLLYEYFTVYNELTKVKYVTEGMRKPAFLSGEQKKAIVDLLFKTNR |
| | | KVTVKQLKEDYFKKIECFDSVEISGVEDRFNASLGTYHDLLKIIKDKD |
| | | FLDNEENEDILEDIVLTLTLFEDREMIEERLKTYAHLFDDKVMKQLK |
| | | RRRYTGWGRLSRKLINGIRDKQSGKTILDFLKSDGFANRNFMQLIHD |
| | | DSLTFKEDIQKAQVSGQGDSLHEHIANLAGSPAIKKGILQTVKVVDE |
| | | LVKVMGRHKPENIVIEMARENQTTQKGQKNSRERMKRIEEGIKELGS |
| | | QILKEHPVENTQLQNEKLYLYYLQNGRDMYVDQELDINRLSDYDVD |
| | | AIVPQSFLKDDSIDNKVLTRSDKNRGKSDNVPSEEVVKKMKNYWRQ |
| | | LLNAKLITQRKFDNLTKAERGGLSELDKAGFIKRQLVETRQITKHVA |
| | | QILDSRMNTKYDENDKLIREVKVITLKSKLVSDFRKDFQFYKVREIN |
| | | NYHHAHDAYLNAVVGTALIKKYPKLESEFVYGDYKVYDVRKMIAK |
| | | SEQEIGKATAKYFFYSNIMNFFKTEITLANGEIRKRPLIETNGETGEIV |
| | | WDKGRDFATVRKVLSMPQVNIVKKTEVQTGGFSKESILPKRNSDKLI |
| | | ARKKDWDPKKYGGFDSPTVAYSVLVVAKVEKGKSKKLKSVKELLG |
| | | ITIMERSSFEKNPIDFLEAKGYKEVKKDLIIKLPKYSLFELENGRKRML |
| | | ASAGELQKGNELALPSKYVNFLYLASHYEKLKGSPEDNEQKQLFVE |
| | | QHKHYLDEIIEQISEFSKRVILADANLDKVLSAYNKHRDKPIREQAEN |
| | | IIHLFTLTNLGAPAAFKYFDTTIDRKRYTSTKEVLDATLIHQSITGLYE |
| | | TRIDLSQLGGDPKKKRKVGGPSSGAPPPSGGSPAGSPTSTEEGTSESA |
| | | TPESGPGTSTEPSEGSAPGSPAGSPTSTEEGTSTEPSEGSAPGTSTEPSE |
| | | TGTLIRKADLENHNKDGGFWTVIDGKVYDIKDFQTQSLTGNSILAQF |
| | | AGEDPVVALEAALQFEDTRESMHAFCVGQYLEPDQ |
| 1043 | Cas-ID2 | MGTPKKKRKVMDKKYSIGLAIGTNSVGWAVITDEYKVPSKKFKVLG |
| | | NTDRHSIKKNLIGALLFDSGETAEATRLKRTARRRYTRRKNRICYLQ |
| | | EIFSNEMAKVDDSFFHRLEESFLVEEDKKHERHPIFGNIVDEVAYHEK |
| | | YPTIYHLRKKLVDSTDKADLRLIYLALAHMIKFRGHFLIEGDLNPDNS |
| | | DVDKLFIQLVQTYNQLFEENPINASGVDAKAILSARLSKSRRLENLIA |
| | | QLPGEKKNGLFGNLIALSLGLTPNFKSNFDLAEDAKLQLSKDTYDDD |
| | | LDNLLAQIGDQYADLFLAAKNLSDAILLSDILRVNTEITKAPLSASMI |
| | | KRYDEHHQDLTLLKALVRQQLPEKYKEIFFDQSKNGYAGYIDGGAS |
| | | QEEFYKFIKPILEKMDGTEELLVKLNREDLLRKQRTFDNGSIPHQIHL |
| | | GELHAILRRQEDFYPFLKDNREKIEKILTFRIPYYVGPLARGNSRFAW |
| | | MTRKSEETITPWNFEEVVDKGASAQSFIERMTNFDKNLPNEKVLPKH |
| | | SLLYEYFTVYNELTKVKYVTEGMRKPAFLSGEQKKAIVDLLFKTNR |
| | | KVTVKQLKEDYFKKIECFDSVEISGVEDRFNASLGTYHDLLKIIKDKD |
| | | FLDNEENEDILEDIVLTLTLFEDREMIEERLKTYAHLFDDKVMKQLK |
| | | RRRYTGWGRLSRKLINGIRDKQSGKTILDFLKSDGFANRNFMQLIHD |
| | | DSLTFKEDIQKAQVSGQGDSLHEHIANLAGSPAIKKGILQTVKVVDE |
| | | LVKVMGRHKPENIVIEMARENQTTQKGQKNSRERMKRIEEGIKELGS |
| | | QILKEHPVENTQLQNEKLYLYYLQNGRDMYVDQELDINRLSDYDVD |
| | | AIVPQSFLKDDSIDNKVLTRSDKNRGKSDNVPSEEVVKKMKNYWRQ |
| | | LLNAKLITQRKFDNLTKAERGGLSELDKAGFIKRQLVETRQITKHVA |
| | | QILDSRMNTKYDENDKLIREVKVITLKSKLVSDFRKDFQFYKVREIN |
| | | NYHHAHDAYLNAVVGTALIKKYPKLESEFVYGDYKVYDVRKMIAK |
| | | SEQEIGKATAKYFFYSNIMNFFKTEITLANGEIRKRPLIETNGETGEIV |
| | | WDKGRDFATVRKVLSMPQVNIVKKTEVQTGGFSKESILPKRNSDKLI |
| | | ARKKDWDPKKYGGFDSPTVAYSVLVVAKVEKGKSKKLKSVKELLG |
| | | ITIMERSSFEKNPIDFLEAKGYKEVKKDLIIKLPKYSLFELENGRKRML |
| | | ASAGELQKGNELALPSKYVNFLYLASHYEKLKGSPEDNEQKQLFVE |
| | | QHKHYLDEIIEQISEFSKRVILADANLDKVLSAYNKHRDKPIREQAEN |
| | | IIHLFTLTNLGAPAAFKYFDTTIDRKRYTSTKEVLDATLIHQSITGLYE |
| | | TRIDLSQLGGDPKKKRKVGGPSSGAPPPSGGSPAGSPTSTEEGTSESA |
| | | TPESGPGTSTEPSEGSAPGSPAGSPTSTEEGTSTEPSEGSAPGTSTEPSE |
| | | TGSDHSLGISRSKTPVDDPMSLLYNMNDCYSKLKELVPSIPQNKKVS |
| | | KMEILQHVIDYILDLQIALDSHPTIVSLHHQRPGQ |
| 1044 | Cas-TOX | MGTPKKKRKVMDKKYSIGLAIGTNSVGWAVITDEYKVPSKKFKVLG |
| | | NTDRHSIKKNLIGALLFDSGETAEATRLKRTARRRYTRRKNRICYLQ |
| | | EIFSNEMAKVDDSFFHRLEESFLVEEDKKHERHPIFGNIVDEVAYHEK |
| | | YPTIYHLRKKLVDSTDKADLRLIYLALAHMIKFRGHFLIEGDLNPDNS |
| | | DVDKLFIQLVQTYNQLFEENPINASGVDAKAILSARLSKSRRLENLIA |
| | | QLPGEKKNGLFGNLIALSLGLTPNFKSNFDLAEDAKLQLSKDTYDDD |
| | | LDNLLAQIGDQYADLFLAAKNLSDAILLSDILRVNTEITKAPLSASMI |
| | | KRYDEHHQDLTLLKALVRQQLPEKYKEIFFDQSKNGYAGYIDGGAS |
| | | QEEFYKFIKPILEKMDGTEELLVKLNREDLLRKQRTFDNGSIPHQIHL |
| | | GELHAILRRQEDFYPFLKDNREKIEKILTFRIPYYVGPLARGNSRFAW |
| | | MTRKSEETITPWNFEEVVDKGASAQSFIERMTNFDKNLPNEKVLPKH |
| | | SLLYEYFTVYNELTKVKYVTEGMRKPAFLSGEQKKAIVDLLFKTNR |
| | | KVTVKQLKEDYFKKIECFDSVEISGVEDRFNASLGTYHDLLKIIKDKD |
| | | FLDNEENEDILEDIVLTLTLFEDREMIEERLKTYAHLFDDKVMKQLK |
| | | RRRYTGWGRLSRKLINGIRDKQSGKTILDFLKSDGFANRNFMQLIHD |
| | | DSLTFKEDIQKAQVSGQGDSLHEHIANLAGSPAIKKGILQTVKVVDE |
| | | LVKVMGRHKPENIVIEMARENQTTQKGQKNSRERMKRIEEGIKELGS |
| | | QILKEHPVENTQLQNEKLYLYYLQNGRDMYVDQELDINRLSDYDVD |
| | | AIVPQSFLKDDSIDNKVLTRSDKNRGKSDNVPSEEVVKKMKNYWRQ |
| | | LLNAKLITQRKFDNLTKAERGGLSELDKAGFIKRQLVETRQITKHVA |
| | | QILDSRMNTKYDENDKLIREVKVITLKSKLVSDFRKDFQFYKVREIN |
| | | NYHHAHDAYLNAVVGTALIKKYPKLESEFVYGDYKVYDVRKMIAK |
| | | SEQEIGKATAKYFFYSNIMNFFKTEITLANGEIRKRPLIETNGETGEIV |
| | | WDKGRDFATVRKVLSMPQVNIVKKTEVQTGGFSKESILPKRNSDKLI |
| | | ARKKDWDPKKYGGFDSPTVAYSVLVVAKVEKGKSKKLKSVKELLG |
| | | ITIMERSSFEKNPIDFLEAKGYKEVKKDLIIKLPKYSLFELENGRKRML |
| | | ASAGELQKGNELALPSKYVNFLYLASHYEKLKGSPEDNEQKQLFVE |
| | | QHKHYLDEIIEQISEFSKRVILADANLDKVLSAYNKHRDKPIREQAEN |
| | | IIHLFTLTNLGAPAAFKYFDTTIDRKRYTSTKEVLDATLIHQSITGLYE |
| | | TRIDLSQLGGDPKKKRKVGGPSSGAPPPSGGSPAGSPTSTEEGTSESA |
| | | TPESGPGTSTEPSEGSAPGSPAGSPTSTEEGTSTEPSEGSAPGTSTEPSE |
| | | TGKDPNEPQKPVSAYALFFRDTQAAIKGQNPNATFGEVSKIVASMW |
| | | DGLGEEQKQVYKKKTEAAKKEYLKQLAAYRASLVSK |
| 1045 | Cas- | MGTPKKKRKVMDKKYSIGLAIGTNSVGWAVITDEYKVPSKKFKVLG |
| | SCMH1 | NTDRHSIKKNLIGALLFDSGETAEATRLKRTARRRYTRRKNRICYLQ |
| | | EIFSNEMAKVDDSFFHRLEESFLVEEDKKHERHPIFGNIVDEVAYHEK |
| | | YPTIYHLRKKLVDSTDKADLRLIYLALAHMIKFRGHFLIEGDLNPDNS |
| | | DVDKLFIQLVQTYNQLFEENPINASGVDAKAILSARLSKSRRLENLIA |
| | | QLPGEKKNGLFGNLIALSLGLTPNFKSNFDLAEDAKLQLSKDTYDDD |
| | | LDNLLAQIGDQYADLFLAAKNLSDAILLSDILRVNTEITKAPLSASMI |
| | | KRYDEHHQDLTLLKALVRQQLPEKYKEIFFDQSKNGYAGYIDGGAS |
| | | QEEFYKFIKPILEKMDGTEELLVKLNREDLLRKQRTFDNGSIPHQIHL |
| | | GELHAILRRQEDFYPFLKDNREKIEKILTFRIPYYVGPLARGNSRFAW |
| | | MTRKSEETITPWNFEEVVDKGASAQSFIERMTNFDKNLPNEKVLPKH |
| | | SLLYEYFTVYNELTKVKYVTEGMRKPAFLSGEQKKAIVDLLFKTNR |
| | | KVTVKQLKEDYFKKIECFDSVEISGVEDRFNASLGTYHDLLKIIKDKD |
| | | FLDNEENEDILEDIVLTLTLFEDREMIEERLKTYAHLFDDKVMKQLK |
| | | RRRYTGWGRLSRKLINGIRDKQSGKTILDFLKSDGFANRNFMQLIHD |
| | | DSLTFKEDIQKAQVSGQGDSLHEHIANLAGSPAIKKGILQTVKVVDE |
| | | LVKVMGRHKPENIVIEMARENQTTQKGQKNSRERMKRIEEGIKELGS |
| | | QILKEHPVENTQLQNEKLYLYYLQNGRDMYVDQELDINRLSDYDVD |
| | | AIVPQSFLKDDSIDNKVLTRSDKNRGKSDNVPSEEVVKKMKNYWRQ |
| | | LLNAKLITQRKFDNLTKAERGGLSELDKAGFIKRQLVETRQITKHVA |
| | | QILDSRMNTKYDENDKLIREVKVITLKSKLVSDFRKDFQFYKVREIN |
| | | NYHHAHDAYLNAVVGTALIKKYPKLESEFVYGDYKVYDVRKMIAK |
| | | SEQEIGKATAKYFFYSNIMNFFKTEITLANGEIRKRPLIETNGETGEIV |
| | | WDKGRDFATVRKVLSMPQVNIVKKTEVQTGGFSKESILPKRNSDKLI |
| | | ARKKDWDPKKYGGFDSPTVAYSVLVVAKVEKGKSKKLKSVKELLG |
| | | ITIMERSSFEKNPIDFLEAKGYKEVKKDLIIKLPKYSLFELENGRKRML |
| | | ASAGELQKGNELALPSKYVNFLYLASHYEKLKGSPEDNEQKQLFVE |
| | | QHKHYLDEIIEQISEFSKRVILADANLDKVLSAYNKHRDKPIREQAEN |
| | | IIHLFTLTNLGAPAAFKYFDTTIDRKRYTSTKEVLDATLIHQSITGLYE |
| | | TRIDLSQLGGDPKKKRKVGGPSSGAPPPSGGSPAGSPTSTEEGTSESA |
| | | TPESGPGTSTEPSEGSAPGSPAGSPTSTEEGTSTEPSEGSAPGTSTEPSE |
| | | TGDASRLSGRDPSSWTVEDVMQFVREADPQLGPHADLFRKHEIDGK |
| | | ALLLLRSDMMMKYMGLKLGPALKLSYHIDRLKQGKF |
| 1046 | Cas-CBX7 | MGTPKKKRKVMDKKYSIGLAIGTNSVGWAVITDEYKVPSKKFKVLG |
| | | NTDRHSIKKNLIGALLFDSGETAEATRLKRTARRRYTRRKNRICYLQ |
| | | EIFSNEMAKVDDSFFHRLEESFLVEEDKKHERHPIFGNIVDEVAYHEK |
| | | YPTIYHLRKKLVDSTDKADLRLIYLALAHMIKFRGHFLIEGDLNPDNS |
| | | DVDKLFIQLVQTYNQLFEENPINASGVDAKAILSARLSKSRRLENLIA |
| | | QLPGEKKNGLFGNLIALSLGLTPNFKSNFDLAEDAKLQLSKDTYDDD |
| | | LDNLLAQIGDQYADLFLAAKNLSDAILLSDILRVNTEITKAPLSASMI |
| | | KRYDEHHQDLTLLKALVRQQLPEKYKEIFFDQSKNGYAGYIDGGAS |
| | | QEEFYKFIKPILEKMDGTEELLVKLNREDLLRKQRTFDNGSIPHQIHL |
| | | GELHAILRRQEDFYPFLKDNREKIEKILTFRIPYYVGPLARGNSRFAW |
| | | MTRKSEETITPWNFEEVVDKGASAQSFIERMTNFDKNLPNEKVLPKH |
| | | SLLYEYFTVYNELTKVKYVTEGMRKPAFLSGEQKKAIVDLLFKTNR |
| | | KVTVKQLKEDYFKKIECFDSVEISGVEDRFNASLGTYHDLLKIIKDKD |
| | | FLDNEENEDILEDIVLTLTLFEDREMIEERLKTYAHLFDDKVMKQLK |
| | | RRRYTGWGRLSRKLINGIRDKQSGKTILDFLKSDGFANRNFMQLIHD |
| | | DSLTFKEDIQKAQVSGQGDSLHEHIANLAGSPAIKKGILQTVKVVDE |
| | | LVKVMGRHKPENIVIEMARENQTTQKGQKNSRERMKRIEEGIKELGS |
| | | QILKEHPVENTQLQNEKLYLYYLQNGRDMYVDQELDINRLSDYDVD |
| | | AIVPQSFLKDDSIDNKVLTRSDKNRGKSDNVPSEEVVKKMKNYWRQ |
| | | LLNAKLITQRKFDNLTKAERGGLSELDKAGFIKRQLVETRQITKHVA |
| | | QILDSRMNTKYDENDKLIREVKVITLKSKLVSDFRKDFQFYKVREIN |
| | | NYHHAHDAYLNAVVGTALIKKYPKLESEFVYGDYKVYDVRKMIAK |
| | | SEQEIGKATAKYFFYSNIMNFFKTEITLANGEIRKRPLIETNGETGEIV |
| | | WDKGRDFATVRKVLSMPQVNIVKKTEVQTGGFSKESILPKRNSDKLI |
| | | ARKKDWDPKKYGGFDSPTVAYSVLVVAKVEKGKSKKLKSVKELLG |
| | | ITIMERSSFEKNPIDFLEAKGYKEVKKDLIIKLPKYSLFELENGRKRML |
| | | ASAGELQKGNELALPSKYVNFLYLASHYEKLKGSPEDNEQKQLFVE |
| | | QHKHYLDEIIEQISEFSKRVILADANLDKVLSAYNKHRDKPIREQAEN |
| | | IIHLFTLTNLGAPAAFKYFDTTIDRKRYTSTKEVLDATLIHQSITGLYE |
| | | TRIDLSQLGGDPKKKRKVGGPSSGAPPPSGGSPAGSPTSTEEGTSESA |
| | | TPESGPGTSTEPSEGSAPGSPAGSPTSTEEGTSTEPSEGSAPGTSTEPSE |
| | | TGELSAIGEQVFAVESIRKKRVRKGKVEYLVKWKGWPPKYSTWEPE |
| | | EHILDPRLVMAYEEKEERDRASGYRKRGPKPKRLLL |
| 1047 | Cas-ID1 | MGTPKKKRKVMDKKYSIGLAIGTNSVGWAVITDEYKVPSKKFKVLG |
| | | NTDRHSIKKNLIGALLFDSGETAEATRLKRTARRRYTRRKNRICYLQ |
| | | EIFSNEMAKVDDSFFHRLEESFLVEEDKKHERHPIFGNIVDEVAYHEK |
| | | YPTIYHLRKKLVDSTDKADLRLIYLALAHMIKFRGHFLIEGDLNPDNS |
| | | DVDKLFIQLVQTYNQLFEENPINASGVDAKAILSARLSKSRRLENLIA |
| | | QLPGEKKNGLFGNLIALSLGLTPNFKSNFDLAEDAKLQLSKDTYDDD |
| | | LDNLLAQIGDQYADLFLAAKNLSDAILLSDILRVNTEITKAPLSASMI |
| | | KRYDEHHQDLTLLKALVRQQLPEKYKEIFFDQSKNGYAGYIDGGAS |
| | | QEEFYKFIKPILEKMDGTEELLVKLNREDLLRKQRTFDNGSIPHQIHL |
| | | GELHAILRRQEDFYPFLKDNREKIEKILTFRIPYYVGPLARGNSRFAW |
| | | MTRKSEETITPWNFEEVVDKGASAQSFIERMTNFDKNLPNEKVLPKH |
| | | SLLYEYFTVYNELTKVKYVTEGMRKPAFLSGEQKKAIVDLLFKTNR |
| | | KVTVKQLKEDYFKKIECFDSVEISGVEDRFNASLGTYHDLLKIIKDKD |
| | | FLDNEENEDILEDIVLTLTLFEDREMIEERLKTYAHLFDDKVMKQLK |
| | | RRRYTGWGRLSRKLINGIRDKQSGKTILDFLKSDGFANRNFMQLIHD |
| | | DSLTFKEDIQKAQVSGQGDSLHEHIANLAGSPAIKKGILQTVKVVDE |
| | | LVKVMGRHKPENIVIEMARENQTTQKGQKNSRERMKRIEEGIKELGS |
| | | QILKEHPVENTQLQNEKLYLYYLQNGRDMYVDQELDINRLSDYDVD |
| | | AIVPQSFLKDDSIDNKVLTRSDKNRGKSDNVPSEEVVKKMKNYWRQ |
| | | LLNAKLITQRKFDNLTKAERGGLSELDKAGFIKRQLVETRQITKHVA |
| | | QILDSRMNTKYDENDKLIREVKVITLKSKLVSDFRKDFQFYKVREIN |
| | | NYHHAHDAYLNAVVGTALIKKYPKLESEFVYGDYKVYDVRKMIAK |
| | | SEQEIGKATAKYFFYSNIMNFFKTEITLANGEIRKRPLIETNGETGEIV |
| | | WDKGRDFATVRKVLSMPQVNIVKKTEVQTGGFSKESILPKRNSDKLI |
| | | ARKKDWDPKKYGGFDSPTVAYSVLVVAKVEKGKSKKLKSVKELLG |
| | | ITIMERSSFEKNPIDFLEAKGYKEVKKDLIIKLPKYSLFELENGRKRML |
| | | ASAGELQKGNELALPSKYVNFLYLASHYEKLKGSPEDNEQKQLFVE |
| | | QHKHYLDEIIEQISEFSKRVILADANLDKVLSAYNKHRDKPIREQAEN |
| | | IIHLFTLTNLGAPAAFKYFDTTIDRKRYTSTKEVLDATLIHQSITGLYE |
| | | TRIDLSQLGGDPKKKRKVGGPSSGAPPPSGGSPAGSPTSTEEGTSESA |
| | | TPESGPGTSTEPSEGSAPGSPAGSPTSTEEGTSTEPSEGSAPGTSTEPSE |
| | | TGGGAGARLPALLDEQQVNVLLYDMNGCYSRLKELVPTLPQNRKV |
| | | SKVEILQHVIDYIRDLQLELNSESEVGTPGGRGLPVR |
| 1048 | Cas-CREM | MGTPKKKRKVMDKKYSIGLAIGTNSVGWAVITDEYKVPSKKFKVLG |
| | | NTDRHSIKKNLIGALLFDSGETAEATRLKRTARRRYTRRKNRICYLQ |
| | | EIFSNEMAKVDDSFFHRLEESFLVEEDKKHERHPIFGNIVDEVAYHEK |
| | | YPTIYHLRKKLVDSTDKADLRLIYLALAHMIKFRGHFLIEGDLNPDNS |
| | | DVDKLFIQLVQTYNQLFEENPINASGVDAKAILSARLSKSRRLENLIA |
| | | QLPGEKKNGLFGNLIALSLGLTPNFKSNFDLAEDAKLQLSKDTYDDD |
| | | LDNLLAQIGDQYADLFLAAKNLSDAILLSDILRVNTEITKAPLSASMI |
| | | KRYDEHHQDLTLLKALVRQQLPEKYKEIFFDQSKNGYAGYIDGGAS |
| | | QEEFYKFIKPILEKMDGTEELLVKLNREDLLRKQRTFDNGSIPHQIHL |
| | | GELHAILRRQEDFYPFLKDNREKIEKILTFRIPYYVGPLARGNSRFAW |
| | | MTRKSEETITPWNFEEVVDKGASAQSFIERMTNFDKNLPNEKVLPKH |
| | | SLLYEYFTVYNELTKVKYVTEGMRKPAFLSGEQKKAIVDLLFKTNR |
| | | KVTVKQLKEDYFKKIECFDSVEISGVEDRFNASLGTYHDLLKIIKDKD |
| | | FLDNEENEDILEDIVLTLTLFEDREMIEERLKTYAHLFDDKVMKQLK |
| | | RRRYTGWGRLSRKLINGIRDKQSGKTILDFLKSDGFANRNFMQLIHD |
| | | DSLTFKEDIQKAQVSGQGDSLHEHIANLAGSPAIKKGILQTVKVVDE |
| | | LVKVMGRHKPENIVIEMARENQTTQKGQKNSRERMKRIEEGIKELGS |
| | | QILKEHPVENTQLQNEKLYLYYLQNGRDMYVDQELDINRLSDYDVD |
| | | AIVPQSFLKDDSIDNKVLTRSDKNRGKSDNVPSEEVVKKMKNYWRQ |
| | | LLNAKLITQRKFDNLTKAERGGLSELDKAGFIKRQLVETRQITKHVA |
| | | QILDSRMNTKYDENDKLIREVKVITLKSKLVSDFRKDFQFYKVREIN |
| | | NYHHAHDAYLNAVVGTALIKKYPKLESEFVYGDYKVYDVRKMIAK |
| | | SEQEIGKATAKYFFYSNIMNFFKTEITLANGEIRKRPLIETNGETGEIV |
| | | WDKGRDFATVRKVLSMPQVNIVKKTEVQTGGFSKESILPKRNSDKLI |
| | | ARKKDWDPKKYGGFDSPTVAYSVLVVAKVEKGKSKKLKSVKELLG |
| | | ITIMERSSFEKNPIDFLEAKGYKEVKKDLIIKLPKYSLFELENGRKRML |
| | | ASAGELQKGNELALPSKYVNFLYLASHYEKLKGSPEDNEQKQLFVE |
| | | QHKHYLDEIIEQISEFSKRVILADANLDKVLSAYNKHRDKPIREQAEN |
| | | IIHLFTLTNLGAPAAFKYFDTTIDRKRYTSTKEVLDATLIHQSITGLYE |
| | | TRIDLSQLGGDPKKKRKVGGPSSGAPPPSGGSPAGSPTSTEEGTSESA |
| | | TPESGPGTSTEPSEGSAPGSPAGSPTSTEEGTSTEPSEGSAPGTSTEPSE |
| | | TGVVMAASPGSLHSPQQLAEEATRKRELRLMKNREAAKECRRRKK |
| | | EYVKCLESRVAVLEVQNKKLIEELETLKDICSPKTDY |
| 1049 | Cas-SCX | MGTPKKKRKVMDKKYSIGLAIGTNSVGWAVITDEYKVPSKKFKVLG |
| | | NTDRHSIKKNLIGALLFDSGETAEATRLKRTARRRYTRRKNRICYLQ |
| | | EIFSNEMAKVDDSFFHRLEESFLVEEDKKHERHPIFGNIVDEVAYHEK |
| | | YPTIYHLRKKLVDSTDKADLRLIYLALAHMIKFRGHFLIEGDLNPDNS |
| | | DVDKLFIQLVQTYNQLFEENPINASGVDAKAILSARLSKSRRLENLIA |
| | | QLPGEKKNGLFGNLIALSLGLTPNFKSNFDLAEDAKLQLSKDTYDDD |
| | | LDNLLAQIGDQYADLFLAAKNLSDAILLSDILRVNTEITKAPLSASMI |
| | | KRYDEHHQDLTLLKALVRQQLPEKYKEIFFDQSKNGYAGYIDGGAS |
| | | QEEFYKFIKPILEKMDGTEELLVKLNREDLLRKQRTFDNGSIPHQIHL |
| | | GELHAILRRQEDFYPFLKDNREKIEKILTFRIPYYVGPLARGNSRFAW |
| | | MTRKSEETITPWNFEEVVDKGASAQSFIERMTNFDKNLPNEKVLPKH |
| | | SLLYEYFTVYNELTKVKYVTEGMRKPAFLSGEQKKAIVDLLFKTNR |
| | | KVTVKQLKEDYFKKIECFDSVEISGVEDRFNASLGTYHDLLKIIKDKD |
| | | FLDNEENEDILEDIVLTLTLFEDREMIEERLKTYAHLFDDKVMKQLK |
| | | RRRYTGWGRLSRKLINGIRDKQSGKTILDFLKSDGFANRNFMQLIHD |
| | | DSLTFKEDIQKAQVSGQGDSLHEHIANLAGSPAIKKGILQTVKVVDE |
| | | LVKVMGRHKPENIVIEMARENQTTQKGQKNSRERMKRIEEGIKELGS |
| | | QILKEHPVENTQLQNEKLYLYYLQNGRDMYVDQELDINRLSDYDVD |
| | | AIVPQSFLKDDSIDNKVLTRSDKNRGKSDNVPSEEVVKKMKNYWRQ |
| | | LLNAKLITQRKFDNLTKAERGGLSELDKAGFIKRQLVETRQITKHVA |
| | | QILDSRMNTKYDENDKLIREVKVITLKSKLVSDFRKDFQFYKVREIN |
| | | NYHHAHDAYLNAVVGTALIKKYPKLESEFVYGDYKVYDVRKMIAK |
| | | SEQEIGKATAKYFFYSNIMNFFKTEITLANGEIRKRPLIETNGETGEIV |
| | | WDKGRDFATVRKVLSMPQVNIVKKTEVQTGGFSKESILPKRNSDKLI |
| | | ARKKDWDPKKYGGFDSPTVAYSVLVVAKVEKGKSKKLKSVKELLG |
| | | ITIMERSSFEKNPIDFLEAKGYKEVKKDLIIKLPKYSLFELENGRKRML |
| | | ASAGELQKGNELALPSKYVNFLYLASHYEKLKGSPEDNEQKQLFVE |
| | | QHKHYLDEIIEQISEFSKRVILADANLDKVLSAYNKHRDKPIREQAEN |
| | | IIHLFTLTNLGAPAAFKYFDTTIDRKRYTSTKEVLDATLIHQSITGLYE |
| | | TRIDLSQLGGDPKKKRKVGGPSSGAPPPSGGSPAGSPTSTEEGTSESA |
| | | TPESGPGTSTEPSEGSAPGSPAGSPTSTEEGTSTEPSEGSAPGTSTEPSE |
| | | TGGGGPGGRPGREPRQRHTANARERDRTNSVNTAFTALRTLIPTEPA |
| | | DRKLSKIETLRLASSYISHLGNVLLAGEACGDGQP |
| 1050 | Cas- | MGTPKKKRKVMDKKYSIGLAIGTNSVGWAVITDEYKVPSKKFKVLG |
| | ASCL1 | NTDRHSIKKNLIGALLFDSGETAEATRLKRTARRRYTRRKNRICYLQ |
| | | EIFSNEMAKVDDSFFHRLEESFLVEEDKKHERHPIFGNIVDEVAYHEK |
| | | YPTIYHLRKKLVDSTDKADLRLIYLALAHMIKFRGHFLIEGDLNPDNS |
| | | DVDKLFIQLVQTYNQLFEENPINASGVDAKAILSARLSKSRRLENLIA |
| | | QLPGEKKNGLFGNLIALSLGLTPNFKSNFDLAEDAKLQLSKDTYDDD |
| | | LDNLLAQIGDQYADLFLAAKNLSDAILLSDILRVNTEITKAPLSASMI |
| | | KRYDEHHQDLTLLKALVRQQLPEKYKEIFFDQSKNGYAGYIDGGAS |
| | | QEEFYKFIKPILEKMDGTEELLVKLNREDLLRKQRTFDNGSIPHQIHL |
| | | GELHAILRRQEDFYPFLKDNREKIEKILTFRIPYYVGPLARGNSRFAW |
| | | MTRKSEETITPWNFEEVVDKGASAQSFIERMTNFDKNLPNEKVLPKH |
| | | SLLYEYFTVYNELTKVKYVTEGMRKPAFLSGEQKKAIVDLLFKTNR |
| | | KVTVKQLKEDYFKKIECFDSVEISGVEDRFNASLGTYHDLLKIIKDKD |
| | | FLDNEENEDILEDIVLTLTLFEDREMIEERLKTYAHLFDDKVMKQLK |
| | | RRRYTGWGRLSRKLINGIRDKQSGKTILDFLKSDGFANRNFMQLIHD |
| | | DSLTFKEDIQKAQVSGQGDSLHEHIANLAGSPAIKKGILQTVKVVDE |
| | | LVKVMGRHKPENIVIEMARENQTTQKGQKNSRERMKRIEEGIKELGS |
| | | QILKEHPVENTQLQNEKLYLYYLQNGRDMYVDQELDINRLSDYDVD |
| | | AIVPQSFLKDDSIDNKVLTRSDKNRGKSDNVPSEEVVKKMKNYWRQ |
| | | LLNAKLITQRKFDNLTKAERGGLSELDKAGFIKRQLVETRQITKHVA |
| | | QILDSRMNTKYDENDKLIREVKVITLKSKLVSDFRKDFQFYKVREIN |
| | | NYHHAHDAYLNAVVGTALIKKYPKLESEFVYGDYKVYDVRKMIAK |
| | | SEQEIGKATAKYFFYSNIMNFFKTEITLANGEIRKRPLIETNGETGEIV |
| | | WDKGRDFATVRKVLSMPQVNIVKKTEVQTGGFSKESILPKRNSDKLI |
| | | ARKKDWDPKKYGGFDSPTVAYSVLVVAKVEKGKSKKLKSVKELLG |
| | | ITIMERSSFEKNPIDFLEAKGYKEVKKDLIIKLPKYSLFELENGRKRML |
| | | ASAGELQKGNELALPSKYVNFLYLASHYEKLKGSPEDNEQKQLFVE |
| | | QHKHYLDEIIEQISEFSKRVILADANLDKVLSAYNKHRDKPIREQAEN |
| | | IIHLFTLTNLGAPAAFKYFDTTIDRKRYTSTKEVLDATLIHQSITGLYE |
| | | TRIDLSQLGGDPKKKRKVGGPSSGAPPPSGGSPAGSPTSTEEGTSESA |
| | | TPESGPGTSTEPSEGSAPGSPAGSPTSTEEGTSTEPSEGSAPGTSTEPSE |
| | | TGSGFGYSLPQQQPAAVARRNERERNRVKLVNLGFATLREHVPNGA |
| | | ANKKMSKVETLRSAVEYIRALQQLLDEHDAVSAAFQ |
| 1051 | Cas- | MGTPKKKRKVMDKKYSIGLAIGTNSVGWAVITDEYKVPSKKFKVLG |
| | SCML2 | NTDRHSIKKNLIGALLFDSGETAEATRLKRTARRRYTRRKNRICYLQ |
| | | EIFSNEMAKVDDSFFHRLEESFLVEEDKKHERHPIFGNIVDEVAYHEK |
| | | YPTIYHLRKKLVDSTDKADLRLIYLALAHMIKFRGHFLIEGDLNPDNS |
| | | DVDKLFIQLVQTYNQLFEENPINASGVDAKAILSARLSKSRRLENLIA |
| | | QLPGEKKNGLFGNLIALSLGLTPNFKSNFDLAEDAKLQLSKDTYDDD |
| | | LDNLLAQIGDQYADLFLAAKNLSDAILLSDILRVNTEITKAPLSASMI |
| | | KRYDEHHQDLTLLKALVRQQLPEKYKEIFFDQSKNGYAGYIDGGAS |
| | | QEEFYKFIKPILEKMDGTEELLVKLNREDLLRKQRTFDNGSIPHQIHL |
| | | GELHAILRRQEDFYPFLKDNREKIEKILTFRIPYYVGPLARGNSRFAW |
| | | MTRKSEETITPWNFEEVVDKGASAQSFIERMTNFDKNLPNEKVLPKH |
| | | SLLYEYFTVYNELTKVKYVTEGMRKPAFLSGEQKKAIVDLLFKTNR |
| | | KVTVKQLKEDYFKKIECFDSVEISGVEDRFNASLGTYHDLLKIIKDKD |
| | | FLDNEENEDILEDIVLTLTLFEDREMIEERLKTYAHLFDDKVMKQLK |
| | | RRRYTGWGRLSRKLINGIRDKQSGKTILDFLKSDGFANRNFMQLIHD |
| | | DSLTFKEDIQKAQVSGQGDSLHEHIANLAGSPAIKKGILQTVKVVDE |
| | | LVKVMGRHKPENIVIEMARENQTTQKGQKNSRERMKRIEEGIKELGS |
| | | QILKEHPVENTQLQNEKLYLYYLQNGRDMYVDQELDINRLSDYDVD |
| | | AIVPQSFLKDDSIDNKVLTRSDKNRGKSDNVPSEEVVKKMKNYWRQ |
| | | LLNAKLITQRKFDNLTKAERGGLSELDKAGFIKRQLVETRQITKHVA |
| | | QILDSRMNTKYDENDKLIREVKVITLKSKLVSDFRKDFQFYKVREIN |
| | | NYHHAHDAYLNAVVGTALIKKYPKLESEFVYGDYKVYDVRKMIAK |
| | | SEQEIGKATAKYFFYSNIMNFFKTEITLANGEIRKRPLIETNGETGEIV |
| | | WDKGRDFATVRKVLSMPQVNIVKKTEVQTGGFSKESILPKRNSDKLI |
| | | ARKKDWDPKKYGGFDSPTVAYSVLVVAKVEKGKSKKLKSVKELLG |
| | | ITIMERSSFEKNPIDFLEAKGYKEVKKDLIIKLPKYSLFELENGRKRML |
| | | ASAGELQKGNELALPSKYVNFLYLASHYEKLKGSPEDNEQKQLFVE |
| | | QHKHYLDEIIEQISEFSKRVILADANLDKVLSAYNKHRDKPIREQAEN |
| | | IIHLFTLTNLGAPAAFKYFDTTIDRKRYTSTKEVLDATLIHQSITGLYE |
| | | TRIDLSQLGGDPKKKRKVGGPSSGAPPPSGGSPAGSPTSTEEGTSESA |
| | | TPESGPGTSTEPSEGSAPGSPAGSPTSTEEGTSTEPSEGSAPGTSTEPSE |
| | | TGKQGFSKDPSTWSVDEVIQFMKHTDPQISGPLADLFRQHEIDGKAL |
| | | FLLKSDVMMKYMGLKLGPALKLCYYIEKLKEGKYS |
| 1052 | Cas- | MGTPKKKRKVMDKKYSIGLAIGTNSVGWAVITDEYKVPSKKFKVLG |
| | TWST1 | NTDRHSIKKNLIGALLFDSGETAEATRLKRTARRRYTRRKNRICYLQ |
| | | EIFSNEMAKVDDSFFHRLEESFLVEEDKKHERHPIFGNIVDEVAYHEK |
| | | YPTIYHLRKKLVDSTDKADLRLIYLALAHMIKFRGHFLIEGDLNPDNS |
| | | DVDKLFIQLVQTYNQLFEENPINASGVDAKAILSARLSKSRRLENLIA |
| | | QLPGEKKNGLFGNLIALSLGLTPNFKSNFDLAEDAKLQLSKDTYDDD |
| | | LDNLLAQIGDQYADLFLAAKNLSDAILLSDILRVNTEITKAPLSASMI |
| | | KRYDEHHQDLTLLKALVRQQLPEKYKEIFFDQSKNGYAGYIDGGAS |
| | | QEEFYKFIKPILEKMDGTEELLVKLNREDLLRKQRTFDNGSIPHQIHL |
| | | GELHAILRRQEDFYPFLKDNREKIEKILTFRIPYYVGPLARGNSRFAW |
| | | MTRKSEETITPWNFEEVVDKGASAQSFIERMTNFDKNLPNEKVLPKH |
| | | SLLYEYFTVYNELTKVKYVTEGMRKPAFLSGEQKKAIVDLLFKTNR |
| | | KVTVKQLKEDYFKKIECFDSVEISGVEDRFNASLGTYHDLLKIIKDKD |
| | | FLDNEENEDILEDIVLTLTLFEDREMIEERLKTYAHLFDDKVMKQLK |
| | | RRRYTGWGRLSRKLINGIRDKQSGKTILDFLKSDGFANRNFMQLIHD |
| | | DSLTFKEDIQKAQVSGQGDSLHEHIANLAGSPAIKKGILQTVKVVDE |
| | | LVKVMGRHKPENIVIEMARENQTTQKGQKNSRERMKRIEEGIKELGS |
| | | QILKEHPVENTQLQNEKLYLYYLQNGRDMYVDQELDINRLSDYDVD |
| | | AIVPQSFLKDDSIDNKVLTRSDKNRGKSDNVPSEEVVKKMKNYWRQ |
| | | LLNAKLITQRKFDNLTKAERGGLSELDKAGFIKRQLVETRQITKHVA |
| | | QILDSRMNTKYDENDKLIREVKVITLKSKLVSDFRKDFQFYKVREIN |
| | | NYHHAHDAYLNAVVGTALIKKYPKLESEFVYGDYKVYDVRKMIAK |
| | | SEQEIGKATAKYFFYSNIMNFFKTEITLANGEIRKRPLIETNGETGEIV |
| | | WDKGRDFATVRKVLSMPQVNIVKKTEVQTGGFSKESILPKRNSDKLI |
| | | ARKKDWDPKKYGGFDSPTVAYSVLVVAKVEKGKSKKLKSVKELLG |
| | | ITIMERSSFEKNPIDFLEAKGYKEVKKDLIIKLPKYSLFELENGRKRML |
| | | ASAGELQKGNELALPSKYVNFLYLASHYEKLKGSPEDNEQKQLFVE |
| | | QHKHYLDEIIEQISEFSKRVILADANLDKVLSAYNKHRDKPIREQAEN |
| | | IIHLFTLTNLGAPAAFKYFDTTIDRKRYTSTKEVLDATLIHQSITGLYE |
| | | TRIDLSQLGGDPKKKRKVGGPSSGAPPPSGGSPAGSPTSTEEGTSESA |
| | | TPESGPGTSTEPSEGSAPGSPAGSPTSTEEGTSTEPSEGSAPGTSTEPSE |
| | | TGSGGGSPQSYEELQTQRVMANVRERQRTQSLNEAFAALRKIIPTLP |
| | | SDKLSKIQTLKLAARYIDFLYQVLQSDELDSKMAS |
| 1053 | Cas- | MGTPKKKRKVMDKKYSIGLAIGTNSVGWAVITDEYKVPSKKFKVLG |
| | CREB1 | NTDRHSIKKNLIGALLFDSGETAEATRLKRTARRRYTRRKNRICYLQ |
| | | EIFSNEMAKVDDSFFHRLEESFLVEEDKKHERHPIFGNIVDEVAYHEK |
| | | YPTIYHLRKKLVDSTDKADLRLIYLALAHMIKFRGHFLIEGDLNPDNS |
| | | DVDKLFIQLVQTYNQLFEENPINASGVDAKAILSARLSKSRRLENLIA |
| | | QLPGEKKNGLFGNLIALSLGLTPNFKSNFDLAEDAKLQLSKDTYDDD |
| | | LDNLLAQIGDQYADLFLAAKNLSDAILLSDILRVNTEITKAPLSASMI |
| | | KRYDEHHQDLTLLKALVRQQLPEKYKEIFFDQSKNGYAGYIDGGAS |
| | | QEEFYKFIKPILEKMDGTEELLVKLNREDLLRKQRTFDNGSIPHQIHL |
| | | GELHAILRRQEDFYPFLKDNREKIEKILTFRIPYYVGPLARGNSRFAW |
| | | MTRKSEETITPWNFEEVVDKGASAQSFIERMTNFDKNLPNEKVLPKH |
| | | SLLYEYFTVYNELTKVKYVTEGMRKPAFLSGEQKKAIVDLLFKTNR |
| | | KVTVKQLKEDYFKKIECFDSVEISGVEDRFNASLGTYHDLLKIIKDKD |
| | | FLDNEENEDILEDIVLTLTLFEDREMIEERLKTYAHLFDDKVMKQLK |
| | | RRRYTGWGRLSRKLINGIRDKQSGKTILDFLKSDGFANRNFMQLIHD |
| | | DSLTFKEDIQKAQVSGQGDSLHEHIANLAGSPAIKKGILQTVKVVDE |
| | | LVKVMGRHKPENIVIEMARENQTTQKGQKNSRERMKRIEEGIKELGS |
| | | QILKEHPVENTQLQNEKLYLYYLQNGRDMYVDQELDINRLSDYDVD |
| | | AIVPQSFLKDDSIDNKVLTRSDKNRGKSDNVPSEEVVKKMKNYWRQ |
| | | LLNAKLITQRKFDNLTKAERGGLSELDKAGFIKRQLVETRQITKHVA |
| | | QILDSRMNTKYDENDKLIREVKVITLKSKLVSDFRKDFQFYKVREIN |
| | | NYHHAHDAYLNAVVGTALIKKYPKLESEFVYGDYKVYDVRKMIAK |
| | | SEQEIGKATAKYFFYSNIMNFFKTEITLANGEIRKRPLIETNGETGEIV |
| | | WDKGRDFATVRKVLSMPQVNIVKKTEVQTGGFSKESILPKRNSDKLI |
| | | ARKKDWDPKKYGGFDSPTVAYSVLVVAKVEKGKSKKLKSVKELLG |
| | | ITIMERSSFEKNPIDFLEAKGYKEVKKDLIIKLPKYSLFELENGRKRML |
| | | ASAGELQKGNELALPSKYVNFLYLASHYEKLKGSPEDNEQKQLFVE |
| | | QHKHYLDEIIEQISEFSKRVILADANLDKVLSAYNKHRDKPIREQAEN |
| | | IIHLFTLTNLGAPAAFKYFDTTIDRKRYTSTKEVLDATLIHQSITGLYE |
| | | TRIDLSQLGGDPKKKRKVGGPSSGAPPPSGGSPAGSPTSTEEGTSESA |
| | | TPESGPGTSTEPSEGSAPGSPAGSPTSTEEGTSTEPSEGSAPGTSTEPSE |
| | | TGIAPGVVMASSPALPTQPAEEAARKREVRLMKNREAARECRRKKK |
| | | EYVKCLENRVAVLENQNKTLIEELKALKDLYCHKSD |
| 1054 | Cas- | MGTPKKKRKVMDKKYSIGLAIGTNSVGWAVITDEYKVPSKKFKVLG |
| | TERF1 | NTDRHSIKKNLIGALLFDSGETAEATRLKRTARRRYTRRKNRICYLQ |
| | | EIFSNEMAKVDDSFFHRLEESFLVEEDKKHERHPIFGNIVDEVAYHEK |
| | | YPTIYHLRKKLVDSTDKADLRLIYLALAHMIKFRGHFLIEGDLNPDNS |
| | | DVDKLFIQLVQTYNQLFEENPINASGVDAKAILSARLSKSRRLENLIA |
| | | QLPGEKKNGLFGNLIALSLGLTPNFKSNFDLAEDAKLQLSKDTYDDD |
| | | LDNLLAQIGDQYADLFLAAKNLSDAILLSDILRVNTEITKAPLSASMI |
| | | KRYDEHHQDLTLLKALVRQQLPEKYKEIFFDQSKNGYAGYIDGGAS |
| | | QEEFYKFIKPILEKMDGTEELLVKLNREDLLRKQRTFDNGSIPHQIHL |
| | | GELHAILRRQEDFYPFLKDNREKIEKILTFRIPYYVGPLARGNSRFAW |
| | | MTRKSEETITPWNFEEVVDKGASAQSFIERMTNFDKNLPNEKVLPKH |
| | | SLLYEYFTVYNELTKVKYVTEGMRKPAFLSGEQKKAIVDLLFKTNR |
| | | KVTVKQLKEDYFKKIECFDSVEISGVEDRFNASLGTYHDLLKIIKDKD |
| | | FLDNEENEDILEDIVLTLTLFEDREMIEERLKTYAHLFDDKVMKQLK |
| | | RRRYTGWGRLSRKLINGIRDKQSGKTILDFLKSDGFANRNFMQLIHD |
| | | DSLTFKEDIQKAQVSGQGDSLHEHIANLAGSPAIKKGILQTVKVVDE |
| | | LVKVMGRHKPENIVIEMARENQTTQKGQKNSRERMKRIEEGIKELGS |
| | | QILKEHPVENTQLQNEKLYLYYLQNGRDMYVDQELDINRLSDYDVD |
| | | AIVPQSFLKDDSIDNKVLTRSDKNRGKSDNVPSEEVVKKMKNYWRQ |
| | | LLNAKLITQRKFDNLTKAERGGLSELDKAGFIKRQLVETRQITKHVA |
| | | QILDSRMNTKYDENDKLIREVKVITLKSKLVSDFRKDFQFYKVREIN |
| | | NYHHAHDAYLNAVVGTALIKKYPKLESEFVYGDYKVYDVRKMIAK |
| | | SEQEIGKATAKYFFYSNIMNFFKTEITLANGEIRKRPLIETNGETGEIV |
| | | WDKGRDFATVRKVLSMPQVNIVKKTEVQTGGFSKESILPKRNSDKLI |
| | | ARKKDWDPKKYGGFDSPTVAYSVLVVAKVEKGKSKKLKSVKELLG |
| | | ITIMERSSFEKNPIDFLEAKGYKEVKKDLIIKLPKYSLFELENGRKRML |
| | | ASAGELQKGNELALPSKYVNFLYLASHYEKLKGSPEDNEQKQLFVE |
| | | QHKHYLDEIIEQISEFSKRVILADANLDKVLSAYNKHRDKPIREQAEN |
| | | IIHLFTLTNLGAPAAFKYFDTTIDRKRYTSTKEVLDATLIHQSITGLYE |
| | | TRIDLSQLGGDPKKKRKVGGPSSGAPPPSGGSPAGSPTSTEEGTSESA |
| | | TPESGPGTSTEPSEGSAPGSPAGSPTSTEEGTSTEPSEGSAPGTSTEPSE |
| | | TGSRIPVSKSQPVTPEKHRARKRQAWLWEEDKNLRSGVRKYGEGN |
| | | WSKILLHYKFNNRTSVMLKDRWRTMKKLKLISSDSED |
| 1055 | Cas-ID3 | MGTPKKKRKVMDKKYSIGLAIGTNSVGWAVITDEYKVPSKKFKVLG |
| | | NTDRHSIKKNLIGALLFDSGETAEATRLKRTARRRYTRRKNRICYLQ |
| | | EIFSNEMAKVDDSFFHRLEESFLVEEDKKHERHPIFGNIVDEVAYHEK |
| | | YPTIYHLRKKLVDSTDKADLRLIYLALAHMIKFRGHFLIEGDLNPDNS |
| | | DVDKLFIQLVQTYNQLFEENPINASGVDAKAILSARLSKSRRLENLIA |
| | | QLPGEKKNGLFGNLIALSLGLTPNFKSNFDLAEDAKLQLSKDTYDDD |
| | | LDNLLAQIGDQYADLFLAAKNLSDAILLSDILRVNTEITKAPLSASMI |
| | | KRYDEHHQDLTLLKALVRQQLPEKYKEIFFDQSKNGYAGYIDGGAS |
| | | QEEFYKFIKPILEKMDGTEELLVKLNREDLLRKQRTFDNGSIPHQIHL |
| | | GELHAILRRQEDFYPFLKDNREKIEKILTFRIPYYVGPLARGNSRFAW |
| | | MTRKSEETITPWNFEEVVDKGASAQSFIERMTNFDKNLPNEKVLPKH |
| | | SLLYEYFTVYNELTKVKYVTEGMRKPAFLSGEQKKAIVDLLFKTNR |
| | | KVTVKQLKEDYFKKIECFDSVEISGVEDRFNASLGTYHDLLKIIKDKD |
| | | FLDNEENEDILEDIVLTLTLFEDREMIEERLKTYAHLFDDKVMKQLK |
| | | RRRYTGWGRLSRKLINGIRDKQSGKTILDFLKSDGFANRNFMQLIHD |
| | | DSLTFKEDIQKAQVSGQGDSLHEHIANLAGSPAIKKGILQTVKVVDE |
| | | LVKVMGRHKPENIVIEMARENQTTQKGQKNSRERMKRIEEGIKELGS |
| | | QILKEHPVENTQLQNEKLYLYYLQNGRDMYVDQELDINRLSDYDVD |
| | | AIVPQSFLKDDSIDNKVLTRSDKNRGKSDNVPSEEVVKKMKNYWRQ |
| | | LLNAKLITQRKFDNLTKAERGGLSELDKAGFIKRQLVETRQITKHVA |
| | | QILDSRMNTKYDENDKLIREVKVITLKSKLVSDFRKDFQFYKVREIN |
| | | NYHHAHDAYLNAVVGTALIKKYPKLESEFVYGDYKVYDVRKMIAK |
| | | SEQEIGKATAKYFFYSNIMNFFKTEITLANGEIRKRPLIETNGETGEIV |
| | | WDKGRDFATVRKVLSMPQVNIVKKTEVQTGGFSKESILPKRNSDKLI |
| | | ARKKDWDPKKYGGFDSPTVAYSVLVVAKVEKGKSKKLKSVKELLG |
| | | ITIMERSSFEKNPIDFLEAKGYKEVKKDLIIKLPKYSLFELENGRKRML |
| | | ASAGELQKGNELALPSKYVNFLYLASHYEKLKGSPEDNEQKQLFVE |
| | | QHKHYLDEIIEQISEFSKRVILADANLDKVLSAYNKHRDKPIREQAEN |
| | | IIHLFTLTNLGAPAAFKYFDTTIDRKRYTSTKEVLDATLIHQSITGLYE |
| | | TRIDLSQLGGDPKKKRKVGGPSSGAPPPSGGSPAGSPTSTEEGTSESA |
| | | TPESGPGTSTEPSEGSAPGSPAGSPTSTEEGTSTEPSEGSAPGTSTEPSE |
| | | TGSLAIARGRGKGPAAEEPLSLLDDMNHCYSRLRELVPGVPRGTQLS |
| | | QVEILQRVIDYILDLQVVLAEPAPGPPDGPHLPIQ |
| 1056 | Cas-CBX8 | MGTPKKKRKVMDKKYSIGLAIGTNSVGWAVITDEYKVPSKKFKVLG |
| | | NTDRHSIKKNLIGALLFDSGETAEATRLKRTARRRYTRRKNRICYLQ |
| | | EIFSNEMAKVDDSFFHRLEESFLVEEDKKHERHPIFGNIVDEVAYHEK |
| | | YPTIYHLRKKLVDSTDKADLRLIYLALAHMIKFRGHFLIEGDLNPDNS |
| | | DVDKLFIQLVQTYNQLFEENPINASGVDAKAILSARLSKSRRLENLIA |
| | | QLPGEKKNGLFGNLIALSLGLTPNFKSNFDLAEDAKLQLSKDTYDDD |
| | | LDNLLAQIGDQYADLFLAAKNLSDAILLSDILRVNTEITKAPLSASMI |
| | | KRYDEHHQDLTLLKALVRQQLPEKYKEIFFDQSKNGYAGYIDGGAS |
| | | QEEFYKFIKPILEKMDGTEELLVKLNREDLLRKQRTFDNGSIPHQIHL |
| | | GELHAILRRQEDFYPFLKDNREKIEKILTFRIPYYVGPLARGNSRFAW |
| | | MTRKSEETITPWNFEEVVDKGASAQSFIERMTNFDKNLPNEKVLPKH |
| | | SLLYEYFTVYNELTKVKYVTEGMRKPAFLSGEQKKAIVDLLFKTNR |
| | | KVTVKQLKEDYFKKIECFDSVEISGVEDRFNASLGTYHDLLKIIKDKD |
| | | FLDNEENEDILEDIVLTLTLFEDREMIEERLKTYAHLFDDKVMKQLK |
| | | RRRYTGWGRLSRKLINGIRDKQSGKTILDFLKSDGFANRNFMQLIHD |
| | | DSLTFKEDIQKAQVSGQGDSLHEHIANLAGSPAIKKGILQTVKVVDE |
| | | LVKVMGRHKPENIVIEMARENQTTQKGQKNSRERMKRIEEGIKELGS |
| | | QILKEHPVENTQLQNEKLYLYYLQNGRDMYVDQELDINRLSDYDVD |
| | | AIVPQSFLKDDSIDNKVLTRSDKNRGKSDNVPSEEVVKKMKNYWRQ |
| | | LLNAKLITQRKFDNLTKAERGGLSELDKAGFIKRQLVETRQITKHVA |
| | | QILDSRMNTKYDENDKLIREVKVITLKSKLVSDFRKDFQFYKVREIN |
| | | NYHHAHDAYLNAVVGTALIKKYPKLESEFVYGDYKVYDVRKMIAK |
| | | SEQEIGKATAKYFFYSNIMNFFKTEITLANGEIRKRPLIETNGETGEIV |
| | | WDKGRDFATVRKVLSMPQVNIVKKTEVQTGGFSKESILPKRNSDKLI |
| | | ARKKDWDPKKYGGFDSPTVAYSVLVVAKVEKGKSKKLKSVKELLG |
| | | ITIMERSSFEKNPIDFLEAKGYKEVKKDLIIKLPKYSLFELENGRKRML |
| | | ASAGELQKGNELALPSKYVNFLYLASHYEKLKGSPEDNEQKQLFVE |
| | | QHKHYLDEIIEQISEFSKRVILADANLDKVLSAYNKHRDKPIREQAEN |
| | | IIHLFTLTNLGAPAAFKYFDTTIDRKRYTSTKEVLDATLIHQSITGLYE |
| | | TRIDLSQLGGDPKKKRKVGGPSSGAPPPSGGSPAGSPTSTEEGTSESA |
| | | TPESGPGTSTEPSEGSAPGSPAGSPTSTEEGTSTEPSEGSAPGTSTEPSE |
| | | TGGSGPPSSGGGLYRDMGAQGGRPSLIARIPVARILGDPEEESWSPSL |
| | | TNLEKVVVTDVTSNFLTVTIKESNTDQGFFKEKR |
| 1057 | Cas-CBX4 | MGTPKKKRKVMDKKYSIGLAIGTNSVGWAVITDEYKVPSKKFKVLG |
| | | NTDRHSIKKNLIGALLFDSGETAEATRLKRTARRRYTRRKNRICYLQ |
| | | EIFSNEMAKVDDSFFHRLEESFLVEEDKKHERHPIFGNIVDEVAYHEK |
| | | YPTIYHLRKKLVDSTDKADLRLIYLALAHMIKFRGHFLIEGDLNPDNS |
| | | DVDKLFIQLVQTYNQLFEENPINASGVDAKAILSARLSKSRRLENLIA |
| | | QLPGEKKNGLFGNLIALSLGLTPNFKSNFDLAEDAKLQLSKDTYDDD |
| | | LDNLLAQIGDQYADLFLAAKNLSDAILLSDILRVNTEITKAPLSASMI |
| | | KRYDEHHQDLTLLKALVRQQLPEKYKEIFFDQSKNGYAGYIDGGAS |
| | | QEEFYKFIKPILEKMDGTEELLVKLNREDLLRKQRTFDNGSIPHQIHL |
| | | GELHAILRRQEDFYPFLKDNREKIEKILTFRIPYYVGPLARGNSRFAW |
| | | MTRKSEETITPWNFEEVVDKGASAQSFIERMTNFDKNLPNEKVLPKH |
| | | SLLYEYFTVYNELTKVKYVTEGMRKPAFLSGEQKKAIVDLLFKTNR |
| | | KVTVKQLKEDYFKKIECFDSVEISGVEDRFNASLGTYHDLLKIIKDKD |
| | | FLDNEENEDILEDIVLTLTLFEDREMIEERLKTYAHLFDDKVMKQLK |
| | | RRRYTGWGRLSRKLINGIRDKQSGKTILDFLKSDGFANRNFMQLIHD |
| | | DSLTFKEDIQKAQVSGQGDSLHEHIANLAGSPAIKKGILQTVKVVDE |
| | | LVKVMGRHKPENIVIEMARENQTTQKGQKNSRERMKRIEEGIKELGS |
| | | QILKEHPVENTQLQNEKLYLYYLQNGRDMYVDQELDINRLSDYDVD |
| | | AIVPQSFLKDDSIDNKVLTRSDKNRGKSDNVPSEEVVKKMKNYWRQ |
| | | LLNAKLITQRKFDNLTKAERGGLSELDKAGFIKRQLVETRQITKHVA |
| | | QILDSRMNTKYDENDKLIREVKVITLKSKLVSDFRKDFQFYKVREIN |
| | | NYHHAHDAYLNAVVGTALIKKYPKLESEFVYGDYKVYDVRKMIAK |
| | | SEQEIGKATAKYFFYSNIMNFFKTEITLANGEIRKRPLIETNGETGEIV |
| | | WDKGRDFATVRKVLSMPQVNIVKKTEVQTGGFSKESILPKRNSDKLI |
| | | ARKKDWDPKKYGGFDSPTVAYSVLVVAKVEKGKSKKLKSVKELLG |
| | | ITIMERSSFEKNPIDFLEAKGYKEVKKDLIIKLPKYSLFELENGRKRML |
| | | ASAGELQKGNELALPSKYVNFLYLASHYEKLKGSPEDNEQKQLFVE |
| | | QHKHYLDEIIEQISEFSKRVILADANLDKVLSAYNKHRDKPIREQAEN |
| | | IIHLFTLTNLGAPAAFKYFDTTIDRKRYTSTKEVLDATLIHQSITGLYE |
| | | TRIDLSQLGGDPKKKRKVGGPSSGAPPPSGGSPAGSPTSTEEGTSESA |
| | | TPESGPGTSTEPSEGSAPGSPAGSPTSTEEGTSTEPSEGSAPGTSTEPSE |
| | | TGELPAVGEHVFAVESIEKKRIRKGRVEYLVKWRGWSPKYNTWEPE |
| | | ENILDPRLLIAFQNRERQEQLMGYRKRGPKPKPLVV |
| 1058 | Cas-GSX1 | MGTPKKKRKVMDKKYSIGLAIGTNSVGWAVITDEYKVPSKKFKVLG |
| | | NTDRHSIKKNLIGALLFDSGETAEATRLKRTARRRYTRRKNRICYLQ |
| | | EIFSNEMAKVDDSFFHRLEESFLVEEDKKHERHPIFGNIVDEVAYHEK |
| | | YPTIYHLRKKLVDSTDKADLRLIYLALAHMIKFRGHFLIEGDLNPDNS |
| | | DVDKLFIQLVQTYNQLFEENPINASGVDAKAILSARLSKSRRLENLIA |
| | | QLPGEKKNGLFGNLIALSLGLTPNFKSNFDLAEDAKLQLSKDTYDDD |
| | | LDNLLAQIGDQYADLFLAAKNLSDAILLSDILRVNTEITKAPLSASMI |
| | | KRYDEHHQDLTLLKALVRQQLPEKYKEIFFDQSKNGYAGYIDGGAS |
| | | QEEFYKFIKPILEKMDGTEELLVKLNREDLLRKQRTFDNGSIPHQIHL |
| | | GELHAILRRQEDFYPFLKDNREKIEKILTFRIPYYVGPLARGNSRFAW |
| | | MTRKSEETITPWNFEEVVDKGASAQSFIERMTNFDKNLPNEKVLPKH |
| | | SLLYEYFTVYNELTKVKYVTEGMRKPAFLSGEQKKAIVDLLFKTNR |
| | | KVTVKQLKEDYFKKIECFDSVEISGVEDRFNASLGTYHDLLKIIKDKD |
| | | FLDNEENEDILEDIVLTLTLFEDREMIEERLKTYAHLFDDKVMKQLK |
| | | RRRYTGWGRLSRKLINGIRDKQSGKTILDFLKSDGFANRNFMQLIHD |
| | | DSLTFKEDIQKAQVSGQGDSLHEHIANLAGSPAIKKGILQTVKVVDE |
| | | LVKVMGRHKPENIVIEMARENQTTQKGQKNSRERMKRIEEGIKELGS |
| | | QILKEHPVENTQLQNEKLYLYYLQNGRDMYVDQELDINRLSDYDVD |
| | | AIVPQSFLKDDSIDNKVLTRSDKNRGKSDNVPSEEVVKKMKNYWRQ |
| | | LLNAKLITQRKFDNLTKAERGGLSELDKAGFIKRQLVETRQITKHVA |
| | | QILDSRMNTKYDENDKLIREVKVITLKSKLVSDFRKDFQFYKVREIN |
| | | NYHHAHDAYLNAVVGTALIKKYPKLESEFVYGDYKVYDVRKMIAK |
| | | SEQEIGKATAKYFFYSNIMNFFKTEITLANGEIRKRPLIETNGETGEIV |
| | | WDKGRDFATVRKVLSMPQVNIVKKTEVQTGGFSKESILPKRNSDKLI |
| | | ARKKDWDPKKYGGFDSPTVAYSVLVVAKVEKGKSKKLKSVKELLG |
| | | ITIMERSSFEKNPIDFLEAKGYKEVKKDLIIKLPKYSLFELENGRKRML |
| | | ASAGELQKGNELALPSKYVNFLYLASHYEKLKGSPEDNEQKQLFVE |
| | | QHKHYLDEIIEQISEFSKRVILADANLDKVLSAYNKHRDKPIREQAEN |
| | | IIHLFTLTNLGAPAAFKYFDTTIDRKRYTSTKEVLDATLIHQSITGLYE |
| | | TRIDLSQLGGDPKKKRKVGGPSSGAPPPSGGSPAGSPTSTEEGTSESA |
| | | TPESGPGTSTEPSEGSAPGSPAGSPTSTEEGTSTEPSEGSAPGTSTEPSE |
| | | TGVDSSSNQLPSSKRMRTAFTSTQLLELEREFASNMYLSRLRRIEIAT |
| | | YLNLSEKQVKIWFQNRRVKHKKEGKGSNHRGGGG |
| 1059 | Cas- | MGTPKKKRKVMDKKYSIGLAIGTNSVGWAVITDEYKVPSKKFKVLG |
| | NKX22 | NTDRHSIKKNLIGALLFDSGETAEATRLKRTARRRYTRRKNRICYLQ |
| | | EIFSNEMAKVDDSFFHRLEESFLVEEDKKHERHPIFGNIVDEVAYHEK |
| | | YPTIYHLRKKLVDSTDKADLRLIYLALAHMIKFRGHFLIEGDLNPDNS |
| | | DVDKLFIQLVQTYNQLFEENPINASGVDAKAILSARLSKSRRLENLIA |
| | | QLPGEKKNGLFGNLIALSLGLTPNFKSNFDLAEDAKLQLSKDTYDDD |
| | | LDNLLAQIGDQYADLFLAAKNLSDAILLSDILRVNTEITKAPLSASMI |
| | | KRYDEHHQDLTLLKALVRQQLPEKYKEIFFDQSKNGYAGYIDGGAS |
| | | QEEFYKFIKPILEKMDGTEELLVKLNREDLLRKQRTFDNGSIPHQIHL |
| | | GELHAILRRQEDFYPFLKDNREKIEKILTFRIPYYVGPLARGNSRFAW |
| | | MTRKSEETITPWNFEEVVDKGASAQSFIERMTNFDKNLPNEKVLPKH |
| | | SLLYEYFTVYNELTKVKYVTEGMRKPAFLSGEQKKAIVDLLFKTNR |
| | | KVTVKQLKEDYFKKIECFDSVEISGVEDRFNASLGTYHDLLKIIKDKD |
| | | FLDNEENEDILEDIVLTLTLFEDREMIEERLKTYAHLFDDKVMKQLK |
| | | RRRYTGWGRLSRKLINGIRDKQSGKTILDFLKSDGFANRNFMQLIHD |
| | | DSLTFKEDIQKAQVSGQGDSLHEHIANLAGSPAIKKGILQTVKVVDE |
| | | LVKVMGRHKPENIVIEMARENQTTQKGQKNSRERMKRIEEGIKELGS |
| | | QILKEHPVENTQLQNEKLYLYYLQNGRDMYVDQELDINRLSDYDVD |
| | | AIVPQSFLKDDSIDNKVLTRSDKNRGKSDNVPSEEVVKKMKNYWRQ |
| | | LLNAKLITQRKFDNLTKAERGGLSELDKAGFIKRQLVETRQITKHVA |
| | | QILDSRMNTKYDENDKLIREVKVITLKSKLVSDFRKDFQFYKVREIN |
| | | NYHHAHDAYLNAVVGTALIKKYPKLESEFVYGDYKVYDVRKMIAK |
| | | SEQEIGKATAKYFFYSNIMNFFKTEITLANGEIRKRPLIETNGETGEIV |
| | | WDKGRDFATVRKVLSMPQVNIVKKTEVQTGGFSKESILPKRNSDKLI |
| | | ARKKDWDPKKYGGFDSPTVAYSVLVVAKVEKGKSKKLKSVKELLG |
| | | ITIMERSSFEKNPIDFLEAKGYKEVKKDLIIKLPKYSLFELENGRKRML |
| | | ASAGELQKGNELALPSKYVNFLYLASHYEKLKGSPEDNEQKQLFVE |
| | | QHKHYLDEIIEQISEFSKRVILADANLDKVLSAYNKHRDKPIREQAEN |
| | | IIHLFTLTNLGAPAAFKYFDTTIDRKRYTSTKEVLDATLIHQSITGLYE |
| | | TRIDLSQLGGDPKKKRKVGGPSSGAPPPSGGSPAGSPTSTEEGTSESA |
| | | TPESGPGTSTEPSEGSAPGSPAGSPTSTEEGTSTEPSEGSAPGTSTEPSE |
| | | TGTPGGGGDAGKKRKRRVLFSKAQTYELERRFRQQRYLSAPEREHL |
| | | ASLIRLTPTQVKIWFQNHRYKMKRARAEKGMEVTPL |
| 1060 | Cas-ATF1 | MGTPKKKRKVMDKKYSIGLAIGTNSVGWAVITDEYKVPSKKFKVLG |
| | | NTDRHSIKKNLIGALLFDSGETAEATRLKRTARRRYTRRKNRICYLQ |
| | | EIFSNEMAKVDDSFFHRLEESFLVEEDKKHERHPIFGNIVDEVAYHEK |
| | | YPTIYHLRKKLVDSTDKADLRLIYLALAHMIKFRGHFLIEGDLNPDNS |
| | | DVDKLFIQLVQTYNQLFEENPINASGVDAKAILSARLSKSRRLENLIA |
| | | QLPGEKKNGLFGNLIALSLGLTPNFKSNFDLAEDAKLQLSKDTYDDD |
| | | LDNLLAQIGDQYADLFLAAKNLSDAILLSDILRVNTEITKAPLSASMI |
| | | KRYDEHHQDLTLLKALVRQQLPEKYKEIFFDQSKNGYAGYIDGGAS |
| | | QEEFYKFIKPILEKMDGTEELLVKLNREDLLRKQRTFDNGSIPHQIHL |
| | | GELHAILRRQEDFYPFLKDNREKIEKILTFRIPYYVGPLARGNSRFAW |
| | | MTRKSEETITPWNFEEVVDKGASAQSFIERMTNFDKNLPNEKVLPKH |
| | | SLLYEYFTVYNELTKVKYVTEGMRKPAFLSGEQKKAIVDLLFKTNR |
| | | KVTVKQLKEDYFKKIECFDSVEISGVEDRFNASLGTYHDLLKIIKDKD |
| | | FLDNEENEDILEDIVLTLTLFEDREMIEERLKTYAHLFDDKVMKQLK |
| | | RRRYTGWGRLSRKLINGIRDKQSGKTILDFLKSDGFANRNFMQLIHD |
| | | DSLTFKEDIQKAQVSGQGDSLHEHIANLAGSPAIKKGILQTVKVVDE |
| | | LVKVMGRHKPENIVIEMARENQTTQKGQKNSRERMKRIEEGIKELGS |
| | | QILKEHPVENTQLQNEKLYLYYLQNGRDMYVDQELDINRLSDYDVD |
| | | AIVPQSFLKDDSIDNKVLTRSDKNRGKSDNVPSEEVVKKMKNYWRQ |
| | | LLNAKLITQRKFDNLTKAERGGLSELDKAGFIKRQLVETRQITKHVA |
| | | QILDSRMNTKYDENDKLIREVKVITLKSKLVSDFRKDFQFYKVREIN |
| | | NYHHAHDAYLNAVVGTALIKKYPKLESEFVYGDYKVYDVRKMIAK |
| | | SEQEIGKATAKYFFYSNIMNFFKTEITLANGEIRKRPLIETNGETGEIV |
| | | WDKGRDFATVRKVLSMPQVNIVKKTEVQTGGFSKESILPKRNSDKLI |
| | | ARKKDWDPKKYGGFDSPTVAYSVLVVAKVEKGKSKKLKSVKELLG |
| | | ITIMERSSFEKNPIDFLEAKGYKEVKKDLIIKLPKYSLFELENGRKRML |
| | | ASAGELQKGNELALPSKYVNFLYLASHYEKLKGSPEDNEQKQLFVE |
| | | QHKHYLDEIIEQISEFSKRVILADANLDKVLSAYNKHRDKPIREQAEN |
| | | IIHLFTLTNLGAPAAFKYFDTTIDRKRYTSTKEVLDATLIHQSITGLYE |
| | | TRIDLSQLGGDPKKKRKVGGPSSGAPPPSGGSPAGSPTSTEEGTSESA |
| | | TPESGPGTSTEPSEGSAPGSPAGSPTSTEEGTSTEPSEGSAPGTSTEPSE |
| | | TGQTVVMTSPVTLTSQTTKTDDPQLKREIRLMKNREAARECRRKKK |
| | | EYVKCLENRVAVLENQNKTLIEELKTLKDLYSNKSV |
| 1061 | Cas- | MGTPKKKRKVMDKKYSIGLAIGTNSVGWAVITDEYKVPSKKFKVLG |
| | TWST2 | NTDRHSIKKNLIGALLFDSGETAEATRLKRTARRRYTRRKNRICYLQ |
| | | EIFSNEMAKVDDSFFHRLEESFLVEEDKKHERHPIFGNIVDEVAYHEK |
| | | YPTIYHLRKKLVDSTDKADLRLIYLALAHMIKFRGHFLIEGDLNPDNS |
| | | DVDKLFIQLVQTYNQLFEENPINASGVDAKAILSARLSKSRRLENLIA |
| | | QLPGEKKNGLFGNLIALSLGLTPNFKSNFDLAEDAKLQLSKDTYDDD |
| | | LDNLLAQIGDQYADLFLAAKNLSDAILLSDILRVNTEITKAPLSASMI |
| | | KRYDEHHQDLTLLKALVRQQLPEKYKEIFFDQSKNGYAGYIDGGAS |
| | | QEEFYKFIKPILEKMDGTEELLVKLNREDLLRKQRTFDNGSIPHQIHL |
| | | GELHAILRRQEDFYPFLKDNREKIEKILTFRIPYYVGPLARGNSRFAW |
| | | MTRKSEETITPWNFEEVVDKGASAQSFIERMTNFDKNLPNEKVLPKH |
| | | SLLYEYFTVYNELTKVKYVTEGMRKPAFLSGEQKKAIVDLLFKTNR |
| | | KVTVKQLKEDYFKKIECFDSVEISGVEDRFNASLGTYHDLLKIIKDKD |
| | | FLDNEENEDILEDIVLTLTLFEDREMIEERLKTYAHLFDDKVMKQLK |
| | | RRRYTGWGRLSRKLINGIRDKQSGKTILDFLKSDGFANRNFMQLIHD |
| | | DSLTFKEDIQKAQVSGQGDSLHEHIANLAGSPAIKKGILQTVKVVDE |
| | | LVKVMGRHKPENIVIEMARENQTTQKGQKNSRERMKRIEEGIKELGS |
| | | QILKEHPVENTQLQNEKLYLYYLQNGRDMYVDQELDINRLSDYDVD |
| | | AIVPQSFLKDDSIDNKVLTRSDKNRGKSDNVPSEEVVKKMKNYWRQ |
| | | LLNAKLITQRKFDNLTKAERGGLSELDKAGFIKRQLVETRQITKHVA |
| | | QILDSRMNTKYDENDKLIREVKVITLKSKLVSDFRKDFQFYKVREIN |
| | | NYHHAHDAYLNAVVGTALIKKYPKLESEFVYGDYKVYDVRKMIAK |
| | | SEQEIGKATAKYFFYSNIMNFFKTEITLANGEIRKRPLIETNGETGEIV |
| | | WDKGRDFATVRKVLSMPQVNIVKKTEVQTGGFSKESILPKRNSDKLI |
| | | ARKKDWDPKKYGGFDSPTVAYSVLVVAKVEKGKSKKLKSVKELLG |
| | | ITIMERSSFEKNPIDFLEAKGYKEVKKDLIIKLPKYSLFELENGRKRML |
| | | ASAGELQKGNELALPSKYVNFLYLASHYEKLKGSPEDNEQKQLFVE |
| | | QHKHYLDEIIEQISEFSKRVILADANLDKVLSAYNKHRDKPIREQAEN |
| | | IIHLFTLTNLGAPAAFKYFDTTIDRKRYTSTKEVLDATLIHQSITGLYE |
| | | TRIDLSQLGGDPKKKRKVGGPSSGAPPPSGGSPAGSPTSTEEGTSESA |
| | | TPESGPGTSTEPSEGSAPGSPAGSPTSTEEGTSTEPSEGSAPGTSTEPSE |
| | | TGKGSPSAQSFEELQSQRILANVRERQRTQSLNEAFAALRKIIPTLPSD |
| | | KLSKIQTLKLAARYIDFLYQVLQSDEMDNKMTS |
| 1062 | Cas-TOX3 | MGTPKKKRKVMDKKYSIGLAIGTNSVGWAVITDEYKVPSKKFKVLG |
| | | NTDRHSIKKNLIGALLFDSGETAEATRLKRTARRRYTRRKNRICYLQ |
| | | EIFSNEMAKVDDSFFHRLEESFLVEEDKKHERHPIFGNIVDEVAYHEK |
| | | YPTIYHLRKKLVDSTDKADLRLIYLALAHMIKFRGHFLIEGDLNPDNS |
| | | DVDKLFIQLVQTYNQLFEENPINASGVDAKAILSARLSKSRRLENLIA |
| | | QLPGEKKNGLFGNLIALSLGLTPNFKSNFDLAEDAKLQLSKDTYDDD |
| | | LDNLLAQIGDQYADLFLAAKNLSDAILLSDILRVNTEITKAPLSASMI |
| | | KRYDEHHQDLTLLKALVRQQLPEKYKEIFFDQSKNGYAGYIDGGAS |
| | | QEEFYKFIKPILEKMDGTEELLVKLNREDLLRKQRTFDNGSIPHQIHL |
| | | GELHAILRRQEDFYPFLKDNREKIEKILTFRIPYYVGPLARGNSRFAW |
| | | MTRKSEETITPWNFEEVVDKGASAQSFIERMTNFDKNLPNEKVLPKH |
| | | SLLYEYFTVYNELTKVKYVTEGMRKPAFLSGEQKKAIVDLLFKTNR |
| | | KVTVKQLKEDYFKKIECFDSVEISGVEDRFNASLGTYHDLLKIIKDKD |
| | | FLDNEENEDILEDIVLTLTLFEDREMIEERLKTYAHLFDDKVMKQLK |
| | | RRRYTGWGRLSRKLINGIRDKQSGKTILDFLKSDGFANRNFMQLIHD |
| | | DSLTFKEDIQKAQVSGQGDSLHEHIANLAGSPAIKKGILQTVKVVDE |
| | | LVKVMGRHKPENIVIEMARENQTTQKGQKNSRERMKRIEEGIKELGS |
| | | QILKEHPVENTQLQNEKLYLYYLQNGRDMYVDQELDINRLSDYDVD |
| | | AIVPQSFLKDDSIDNKVLTRSDKNRGKSDNVPSEEVVKKMKNYWRQ |
| | | LLNAKLITQRKFDNLTKAERGGLSELDKAGFIKRQLVETRQITKHVA |
| | | QILDSRMNTKYDENDKLIREVKVITLKSKLVSDFRKDFQFYKVREIN |
| | | NYHHAHDAYLNAVVGTALIKKYPKLESEFVYGDYKVYDVRKMIAK |
| | | SEQEIGKATAKYFFYSNIMNFFKTEITLANGEIRKRPLIETNGETGEIV |
| | | WDKGRDFATVRKVLSMPQVNIVKKTEVQTGGFSKESILPKRNSDKLI |
| | | ARKKDWDPKKYGGFDSPTVAYSVLVVAKVEKGKSKKLKSVKELLG |
| | | ITIMERSSFEKNPIDFLEAKGYKEVKKDLIIKLPKYSLFELENGRKRML |
| | | ASAGELQKGNELALPSKYVNFLYLASHYEKLKGSPEDNEQKQLFVE |
| | | QHKHYLDEIIEQISEFSKRVILADANLDKVLSAYNKHRDKPIREQAEN |
| | | IIHLFTLTNLGAPAAFKYFDTTIDRKRYTSTKEVLDATLIHQSITGLYE |
| | | TRIDLSQLGGDPKKKRKVGGPSSGAPPPSGGSPAGSPTSTEEGTSESA |
| | | TPESGPGTSTEPSEGSAPGSPAGSPTSTEEGTSTEPSEGSAPGTSTEPSE |
| | | TGKDPNEPQKPVSAYALFFRDTQAAIKGQNPNATFGEVSKIVASMW |
| | | DSLGEEQKQVYKRKTEAAKKEYLKALAAYRASLVSK |
| 1063 | Cas-TOX4 | MGTPKKKRKVMDKKYSIGLAIGTNSVGWAVITDEYKVPSKKFKVLG |
| | | NTDRHSIKKNLIGALLFDSGETAEATRLKRTARRRYTRRKNRICYLQ |
| | | EIFSNEMAKVDDSFFHRLEESFLVEEDKKHERHPIFGNIVDEVAYHEK |
| | | YPTIYHLRKKLVDSTDKADLRLIYLALAHMIKFRGHFLIEGDLNPDNS |
| | | DVDKLFIQLVQTYNQLFEENPINASGVDAKAILSARLSKSRRLENLIA |
| | | QLPGEKKNGLFGNLIALSLGLTPNFKSNFDLAEDAKLQLSKDTYDDD |
| | | LDNLLAQIGDQYADLFLAAKNLSDAILLSDILRVNTEITKAPLSASMI |
| | | KRYDEHHQDLTLLKALVRQQLPEKYKEIFFDQSKNGYAGYIDGGAS |
| | | QEEFYKFIKPILEKMDGTEELLVKLNREDLLRKQRTFDNGSIPHQIHL |
| | | GELHAILRRQEDFYPFLKDNREKIEKILTFRIPYYVGPLARGNSRFAW |
| | | MTRKSEETITPWNFEEVVDKGASAQSFIERMTNFDKNLPNEKVLPKH |
| | | SLLYEYFTVYNELTKVKYVTEGMRKPAFLSGEQKKAIVDLLFKTNR |
| | | KVTVKQLKEDYFKKIECFDSVEISGVEDRFNASLGTYHDLLKIIKDKD |
| | | FLDNEENEDILEDIVLTLTLFEDREMIEERLKTYAHLFDDKVMKQLK |
| | | RRRYTGWGRLSRKLINGIRDKQSGKTILDFLKSDGFANRNFMQLIHD |
| | | DSLTFKEDIQKAQVSGQGDSLHEHIANLAGSPAIKKGILQTVKVVDE |
| | | LVKVMGRHKPENIVIEMARENQTTQKGQKNSRERMKRIEEGIKELGS |
| | | QILKEHPVENTQLQNEKLYLYYLQNGRDMYVDQELDINRLSDYDVD |
| | | AIVPQSFLKDDSIDNKVLTRSDKNRGKSDNVPSEEVVKKMKNYWRQ |
| | | LLNAKLITQRKFDNLTKAERGGLSELDKAGFIKRQLVETRQITKHVA |
| | | QILDSRMNTKYDENDKLIREVKVITLKSKLVSDFRKDFQFYKVREIN |
| | | NYHHAHDAYLNAVVGTALIKKYPKLESEFVYGDYKVYDVRKMIAK |
| | | SEQEIGKATAKYFFYSNIMNFFKTEITLANGEIRKRPLIETNGETGEIV |
| | | WDKGRDFATVRKVLSMPQVNIVKKTEVQTGGFSKESILPKRNSDKLI |
| | | ARKKDWDPKKYGGFDSPTVAYSVLVVAKVEKGKSKKLKSVKELLG |
| | | ITIMERSSFEKNPIDFLEAKGYKEVKKDLIIKLPKYSLFELENGRKRML |
| | | ASAGELQKGNELALPSKYVNFLYLASHYEKLKGSPEDNEQKQLFVE |
| | | QHKHYLDEIIEQISEFSKRVILADANLDKVLSAYNKHRDKPIREQAEN |
| | | IIHLFTLTNLGAPAAFKYFDTTIDRKRYTSTKEVLDATLIHQSITGLYE |
| | | TRIDLSQLGGDPKKKRKVGGPSSGAPPPSGGSPAGSPTSTEEGTSESA |
| | | TPESGPGTSTEPSEGSAPGSPAGSPTSTEEGTSTEPSEGSAPGTSTEPSE |
| | | TGKDPNEPQKPVSAYALFFRDTQAAIKGQNPNATFGEVSKIVASMW |
| | | DSLGEEQKQVYKRKTEAAKKEYLKALAAYKDNQECQ |
| 1064 | Cas- | MGTPKKKRKVMDKKYSIGLAIGTNSVGWAVITDEYKVPSKKFKVLG |
| | ZMYM3 | NTDRHSIKKNLIGALLFDSGETAEATRLKRTARRRYTRRKNRICYLQ |
| | | EIFSNEMAKVDDSFFHRLEESFLVEEDKKHERHPIFGNIVDEVAYHEK |
| | | YPTIYHLRKKLVDSTDKADLRLIYLALAHMIKFRGHFLIEGDLNPDNS |
| | | DVDKLFIQLVQTYNQLFEENPINASGVDAKAILSARLSKSRRLENLIA |
| | | QLPGEKKNGLFGNLIALSLGLTPNFKSNFDLAEDAKLQLSKDTYDDD |
| | | LDNLLAQIGDQYADLFLAAKNLSDAILLSDILRVNTEITKAPLSASMI |
| | | KRYDEHHQDLTLLKALVRQQLPEKYKEIFFDQSKNGYAGYIDGGAS |
| | | QEEFYKFIKPILEKMDGTEELLVKLNREDLLRKQRTFDNGSIPHQIHL |
| | | GELHAILRRQEDFYPFLKDNREKIEKILTFRIPYYVGPLARGNSRFAW |
| | | MTRKSEETITPWNFEEVVDKGASAQSFIERMTNFDKNLPNEKVLPKH |
| | | SLLYEYFTVYNELTKVKYVTEGMRKPAFLSGEQKKAIVDLLFKTNR |
| | | KVTVKQLKEDYFKKIECFDSVEISGVEDRFNASLGTYHDLLKIIKDKD |
| | | FLDNEENEDILEDIVLTLTLFEDREMIEERLKTYAHLFDDKVMKQLK |
| | | RRRYTGWGRLSRKLINGIRDKQSGKTILDFLKSDGFANRNFMQLIHD |
| | | DSLTFKEDIQKAQVSGQGDSLHEHIANLAGSPAIKKGILQTVKVVDE |
| | | LVKVMGRHKPENIVIEMARENQTTQKGQKNSRERMKRIEEGIKELGS |
| | | QILKEHPVENTQLQNEKLYLYYLQNGRDMYVDQELDINRLSDYDVD |
| | | AIVPQSFLKDDSIDNKVLTRSDKNRGKSDNVPSEEVVKKMKNYWRQ |
| | | LLNAKLITQRKFDNLTKAERGGLSELDKAGFIKRQLVETRQITKHVA |
| | | QILDSRMNTKYDENDKLIREVKVITLKSKLVSDFRKDFQFYKVREIN |
| | | NYHHAHDAYLNAVVGTALIKKYPKLESEFVYGDYKVYDVRKMIAK |
| | | SEQEIGKATAKYFFYSNIMNFFKTEITLANGEIRKRPLIETNGETGEIV |
| | | WDKGRDFATVRKVLSMPQVNIVKKTEVQTGGFSKESILPKRNSDKLI |
| | | ARKKDWDPKKYGGFDSPTVAYSVLVVAKVEKGKSKKLKSVKELLG |
| | | ITIMERSSFEKNPIDFLEAKGYKEVKKDLIIKLPKYSLFELENGRKRML |
| | | ASAGELQKGNELALPSKYVNFLYLASHYEKLKGSPEDNEQKQLFVE |
| | | QHKHYLDEIIEQISEFSKRVILADANLDKVLSAYNKHRDKPIREQAEN |
| | | IIHLFTLTNLGAPAAFKYFDTTIDRKRYTSTKEVLDATLIHQSITGLYE |
| | | TRIDLSQLGGDPKKKRKVGGPSSGAPPPSGGSPAGSPTSTEEGTSESA |
| | | TPESGPGTSTEPSEGSAPGSPAGSPTSTEEGTSTEPSEGSAPGTSTEPSE |
| | | TGLDGSTWDFCSEDCKSKYLLWYCKAARCHACKRQGKLLETIHWR |
| | | GQIRHFCNQQCLLRFYSQQNQPNLDTQSGPESLLNSQ |
| 1065 | Cas-I2BP1 | MGTPKKKRKVMDKKYSIGLAIGTNSVGWAVITDEYKVPSKKFKVLG |
| | | NTDRHSIKKNLIGALLFDSGETAEATRLKRTARRRYTRRKNRICYLQ |
| | | EIFSNEMAKVDDSFFHRLEESFLVEEDKKHERHPIFGNIVDEVAYHEK |
| | | YPTIYHLRKKLVDSTDKADLRLIYLALAHMIKFRGHFLIEGDLNPDNS |
| | | DVDKLFIQLVQTYNQLFEENPINASGVDAKAILSARLSKSRRLENLIA |
| | | QLPGEKKNGLFGNLIALSLGLTPNFKSNFDLAEDAKLQLSKDTYDDD |
| | | LDNLLAQIGDQYADLFLAAKNLSDAILLSDILRVNTEITKAPLSASMI |
| | | KRYDEHHQDLTLLKALVRQQLPEKYKEIFFDQSKNGYAGYIDGGAS |
| | | QEEFYKFIKPILEKMDGTEELLVKLNREDLLRKQRTFDNGSIPHQIHL |
| | | GELHAILRRQEDFYPFLKDNREKIEKILTFRIPYYVGPLARGNSRFAW |
| | | MTRKSEETITPWNFEEVVDKGASAQSFIERMTNFDKNLPNEKVLPKH |
| | | SLLYEYFTVYNELTKVKYVTEGMRKPAFLSGEQKKAIVDLLFKTNR |
| | | KVTVKQLKEDYFKKIECFDSVEISGVEDRFNASLGTYHDLLKIIKDKD |
| | | FLDNEENEDILEDIVLTLTLFEDREMIEERLKTYAHLFDDKVMKQLK |
| | | RRRYTGWGRLSRKLINGIRDKQSGKTILDFLKSDGFANRNFMQLIHD |
| | | DSLTFKEDIQKAQVSGQGDSLHEHIANLAGSPAIKKGILQTVKVVDE |
| | | LVKVMGRHKPENIVIEMARENQTTQKGQKNSRERMKRIEEGIKELGS |
| | | QILKEHPVENTQLQNEKLYLYYLQNGRDMYVDQELDINRLSDYDVD |
| | | AIVPQSFLKDDSIDNKVLTRSDKNRGKSDNVPSEEVVKKMKNYWRQ |
| | | LLNAKLITQRKFDNLTKAERGGLSELDKAGFIKRQLVETRQITKHVA |
| | | QILDSRMNTKYDENDKLIREVKVITLKSKLVSDFRKDFQFYKVREIN |
| | | NYHHAHDAYLNAVVGTALIKKYPKLESEFVYGDYKVYDVRKMIAK |
| | | SEQEIGKATAKYFFYSNIMNFFKTEITLANGEIRKRPLIETNGETGEIV |
| | | WDKGRDFATVRKVLSMPQVNIVKKTEVQTGGFSKESILPKRNSDKLI |
| | | ARKKDWDPKKYGGFDSPTVAYSVLVVAKVEKGKSKKLKSVKELLG |
| | | ITIMERSSFEKNPIDFLEAKGYKEVKKDLIIKLPKYSLFELENGRKRML |
| | | ASAGELQKGNELALPSKYVNFLYLASHYEKLKGSPEDNEQKQLFVE |
| | | QHKHYLDEIIEQISEFSKRVILADANLDKVLSAYNKHRDKPIREQAEN |
| | | IIHLFTLTNLGAPAAFKYFDTTIDRKRYTSTKEVLDATLIHQSITGLYE |
| | | TRIDLSQLGGDPKKKRKVGGPSSGAPPPSGGSPAGSPTSTEEGTSESA |
| | | TPESGPGTSTEPSEGSAPGSPAGSPTSTEEGTSTEPSEGSAPGTSTEPSE |
| | | TGASVQASRRQWCYLCDLPKMPWAMVWDFSEAVCRGCVNFEGAD |
| | | RIELLIDAARQLKRSHVLPEGRSPGPPALKHPATKDLA |
| 1066 | Cas- | MGTPKKKRKVMDKKYSIGLAIGTNSVGWAVITDEYKVPSKKFKVLG |
| | RHXF1 | NTDRHSIKKNLIGALLFDSGETAEATRLKRTARRRYTRRKNRICYLQ |
| | | EIFSNEMAKVDDSFFHRLEESFLVEEDKKHERHPIFGNIVDEVAYHEK |
| | | YPTIYHLRKKLVDSTDKADLRLIYLALAHMIKFRGHFLIEGDLNPDNS |
| | | DVDKLFIQLVQTYNQLFEENPINASGVDAKAILSARLSKSRRLENLIA |
| | | QLPGEKKNGLFGNLIALSLGLTPNFKSNFDLAEDAKLQLSKDTYDDD |
| | | LDNLLAQIGDQYADLFLAAKNLSDAILLSDILRVNTEITKAPLSASMI |
| | | KRYDEHHQDLTLLKALVRQQLPEKYKEIFFDQSKNGYAGYIDGGAS |
| | | QEEFYKFIKPILEKMDGTEELLVKLNREDLLRKQRTFDNGSIPHQIHL |
| | | GELHAILRRQEDFYPFLKDNREKIEKILTFRIPYYVGPLARGNSRFAW |
| | | MTRKSEETITPWNFEEVVDKGASAQSFIERMTNFDKNLPNEKVLPKH |
| | | SLLYEYFTVYNELTKVKYVTEGMRKPAFLSGEQKKAIVDLLFKTNR |
| | | KVTVKQLKEDYFKKIECFDSVEISGVEDRFNASLGTYHDLLKIIKDKD |
| | | FLDNEENEDILEDIVLTLTLFEDREMIEERLKTYAHLFDDKVMKQLK |
| | | RRRYTGWGRLSRKLINGIRDKQSGKTILDFLKSDGFANRNFMQLIHD |
| | | DSLTFKEDIQKAQVSGQGDSLHEHIANLAGSPAIKKGILQTVKVVDE |
| | | LVKVMGRHKPENIVIEMARENQTTQKGQKNSRERMKRIEEGIKELGS |
| | | QILKEHPVENTQLQNEKLYLYYLQNGRDMYVDQELDINRLSDYDVD |
| | | AIVPQSFLKDDSIDNKVLTRSDKNRGKSDNVPSEEVVKKMKNYWRQ |
| | | LLNAKLITQRKFDNLTKAERGGLSELDKAGFIKRQLVETRQITKHVA |
| | | QILDSRMNTKYDENDKLIREVKVITLKSKLVSDFRKDFQFYKVREIN |
| | | NYHHAHDAYLNAVVGTALIKKYPKLESEFVYGDYKVYDVRKMIAK |
| | | SEQEIGKATAKYFFYSNIMNFFKTEITLANGEIRKRPLIETNGETGEIV |
| | | WDKGRDFATVRKVLSMPQVNIVKKTEVQTGGFSKESILPKRNSDKLI |
| | | ARKKDWDPKKYGGFDSPTVAYSVLVVAKVEKGKSKKLKSVKELLG |
| | | ITIMERSSFEKNPIDFLEAKGYKEVKKDLIIKLPKYSLFELENGRKRML |
| | | ASAGELQKGNELALPSKYVNFLYLASHYEKLKGSPEDNEQKQLFVE |
| | | QHKHYLDEIIEQISEFSKRVILADANLDKVLSAYNKHRDKPIREQAEN |
| | | IIHLFTLTNLGAPAAFKYFDTTIDRKRYTSTKEVLDATLIHQSITGLYE |
| | | TRIDLSQLGGDPKKKRKVGGPSSGAPPPSGGSPAGSPTSTEEGTSESA |
| | | TPESGPGTSTEPSEGSAPGSPAGSPTSTEEGTSTEPSEGSAPGTSTEPSE |
| | | TGMEGPQPENMQPRTRRTKFTLLQVEELESVFRHTQYPDVPTRRELA |
| | | ENLGVTEDKVRVWFKNKRARCRRHQRELMLANELR |
| 1067 | Cas-SSX2 | MGTPKKKRKVMDKKYSIGLAIGTNSVGWAVITDEYKVPSKKFKVLG |
| | | NTDRHSIKKNLIGALLFDSGETAEATRLKRTARRRYTRRKNRICYLQ |
| | | EIFSNEMAKVDDSFFHRLEESFLVEEDKKHERHPIFGNIVDEVAYHEK |
| | | YPTIYHLRKKLVDSTDKADLRLIYLALAHMIKFRGHFLIEGDLNPDNS |
| | | DVDKLFIQLVQTYNQLFEENPINASGVDAKAILSARLSKSRRLENLIA |
| | | QLPGEKKNGLFGNLIALSLGLTPNFKSNFDLAEDAKLQLSKDTYDDD |
| | | LDNLLAQIGDQYADLFLAAKNLSDAILLSDILRVNTEITKAPLSASMI |
| | | KRYDEHHQDLTLLKALVRQQLPEKYKEIFFDQSKNGYAGYIDGGAS |
| | | QEEFYKFIKPILEKMDGTEELLVKLNREDLLRKQRTFDNGSIPHQIHL |
| | | GELHAILRRQEDFYPFLKDNREKIEKILTFRIPYYVGPLARGNSRFAW |
| | | MTRKSEETITPWNFEEVVDKGASAQSFIERMTNFDKNLPNEKVLPKH |
| | | SLLYEYFTVYNELTKVKYVTEGMRKPAFLSGEQKKAIVDLLFKTNR |
| | | KVTVKQLKEDYFKKIECFDSVEISGVEDRFNASLGTYHDLLKIIKDKD |
| | | FLDNEENEDILEDIVLTLTLFEDREMIEERLKTYAHLFDDKVMKQLK |
| | | RRRYTGWGRLSRKLINGIRDKQSGKTILDFLKSDGFANRNFMQLIHD |
| | | DSLTFKEDIQKAQVSGQGDSLHEHIANLAGSPAIKKGILQTVKVVDE |
| | | LVKVMGRHKPENIVIEMARENQTTQKGQKNSRERMKRIEEGIKELGS |
| | | QILKEHPVENTQLQNEKLYLYYLQNGRDMYVDQELDINRLSDYDVD |
| | | AIVPQSFLKDDSIDNKVLTRSDKNRGKSDNVPSEEVVKKMKNYWRQ |
| | | LLNAKLITQRKFDNLTKAERGGLSELDKAGFIKRQLVETRQITKHVA |
| | | QILDSRMNTKYDENDKLIREVKVITLKSKLVSDFRKDFQFYKVREIN |
| | | NYHHAHDAYLNAVVGTALIKKYPKLESEFVYGDYKVYDVRKMIAK |
| | | SEQEIGKATAKYFFYSNIMNFFKTEITLANGEIRKRPLIETNGETGEIV |
| | | WDKGRDFATVRKVLSMPQVNIVKKTEVQTGGFSKESILPKRNSDKLI |
| | | ARKKDWDPKKYGGFDSPTVAYSVLVVAKVEKGKSKKLKSVKELLG |
| | | ITIMERSSFEKNPIDFLEAKGYKEVKKDLIIKLPKYSLFELENGRKRML |
| | | ASAGELQKGNELALPSKYVNFLYLASHYEKLKGSPEDNEQKQLFVE |
| | | QHKHYLDEIIEQISEFSKRVILADANLDKVLSAYNKHRDKPIREQAEN |
| | | IIHLFTLTNLGAPAAFKYFDTTIDRKRYTSTKEVLDATLIHQSITGLYE |
| | | TRIDLSQLGGDPKKKRKVGGPSSGAPPPSGGSPAGSPTSTEEGTSESA |
| | | TPESGPGTSTEPSEGSAPGSPAGSPTSTEEGTSTEPSEGSAPGTSTEPSE |
| | | TGPKIMPKKPAEEGNDSEEVPEASGPQNDGKELCPPGKPTTSEKIHER |
| | | SGPKRGEHAWTHRLRERKQLVIYEEISDPEEDDE |
| 1068 | Cas-I2BPL | MGTPKKKRKVMDKKYSIGLAIGTNSVGWAVITDEYKVPSKKFKVLG |
| | | NTDRHSIKKNLIGALLFDSGETAEATRLKRTARRRYTRRKNRICYLQ |
| | | EIFSNEMAKVDDSFFHRLEESFLVEEDKKHERHPIFGNIVDEVAYHEK |
| | | YPTIYHLRKKLVDSTDKADLRLIYLALAHMIKFRGHFLIEGDLNPDNS |
| | | DVDKLFIQLVQTYNQLFEENPINASGVDAKAILSARLSKSRRLENLIA |
| | | QLPGEKKNGLFGNLIALSLGLTPNFKSNFDLAEDAKLQLSKDTYDDD |
| | | LDNLLAQIGDQYADLFLAAKNLSDAILLSDILRVNTEITKAPLSASMI |
| | | KRYDEHHQDLTLLKALVRQQLPEKYKEIFFDQSKNGYAGYIDGGAS |
| | | QEEFYKFIKPILEKMDGTEELLVKLNREDLLRKQRTFDNGSIPHQIHL |
| | | GELHAILRRQEDFYPFLKDNREKIEKILTFRIPYYVGPLARGNSRFAW |
| | | MTRKSEETITPWNFEEVVDKGASAQSFIERMTNFDKNLPNEKVLPKH |
| | | SLLYEYFTVYNELTKVKYVTEGMRKPAFLSGEQKKAIVDLLFKTNR |
| | | KVTVKQLKEDYFKKIECFDSVEISGVEDRFNASLGTYHDLLKIIKDKD |
| | | FLDNEENEDILEDIVLTLTLFEDREMIEERLKTYAHLFDDKVMKQLK |
| | | RRRYTGWGRLSRKLINGIRDKQSGKTILDFLKSDGFANRNFMQLIHD |
| | | DSLTFKEDIQKAQVSGQGDSLHEHIANLAGSPAIKKGILQTVKVVDE |
| | | LVKVMGRHKPENIVIEMARENQTTQKGQKNSRERMKRIEEGIKELGS |
| | | QILKEHPVENTQLQNEKLYLYYLQNGRDMYVDQELDINRLSDYDVD |
| | | AIVPQSFLKDDSIDNKVLTRSDKNRGKSDNVPSEEVVKKMKNYWRQ |
| | | LLNAKLITQRKFDNLTKAERGGLSELDKAGFIKRQLVETRQITKHVA |
| | | QILDSRMNTKYDENDKLIREVKVITLKSKLVSDFRKDFQFYKVREIN |
| | | NYHHAHDAYLNAVVGTALIKKYPKLESEFVYGDYKVYDVRKMIAK |
| | | SEQEIGKATAKYFFYSNIMNFFKTEITLANGEIRKRPLIETNGETGEIV |
| | | WDKGRDFATVRKVLSMPQVNIVKKTEVQTGGFSKESILPKRNSDKLI |
| | | ARKKDWDPKKYGGFDSPTVAYSVLVVAKVEKGKSKKLKSVKELLG |
| | | ITIMERSSFEKNPIDFLEAKGYKEVKKDLIIKLPKYSLFELENGRKRML |
| | | ASAGELQKGNELALPSKYVNFLYLASHYEKLKGSPEDNEQKQLFVE |
| | | QHKHYLDEIIEQISEFSKRVILADANLDKVLSAYNKHRDKPIREQAEN |
| | | IIHLFTLTNLGAPAAFKYFDTTIDRKRYTSTKEVLDATLIHQSITGLYE |
| | | TRIDLSQLGGDPKKKRKVGGPSSGAPPPSGGSPAGSPTSTEEGTSESA |
| | | TPESGPGTSTEPSEGSAPGSPAGSPTSTEEGTSTEPSEGSAPGTSTEPSE |
| | | TGSAAQVSSSRRQSCYLCDLPRMPWAMIWDFSEPVCRGCVNYEGA |
| | | DRIEFVIETARQLKRAHGCFQDGRSPGPPPPVGVKTV |
| 1069 | Cas-CBX1 | MGTPKKKRKVMDKKYSIGLAIGTNSVGWAVITDEYKVPSKKFKVLG |
| | | NTDRHSIKKNLIGALLFDSGETAEATRLKRTARRRYTRRKNRICYLQ |
| | | EIFSNEMAKVDDSFFHRLEESFLVEEDKKHERHPIFGNIVDEVAYHEK |
| | | YPTIYHLRKKLVDSTDKADLRLIYLALAHMIKFRGHFLIEGDLNPDNS |
| | | DVDKLFIQLVQTYNQLFEENPINASGVDAKAILSARLSKSRRLENLIA |
| | | QLPGEKKNGLFGNLIALSLGLTPNFKSNFDLAEDAKLQLSKDTYDDD |
| | | LDNLLAQIGDQYADLFLAAKNLSDAILLSDILRVNTEITKAPLSASMI |
| | | KRYDEHHQDLTLLKALVRQQLPEKYKEIFFDQSKNGYAGYIDGGAS |
| | | QEEFYKFIKPILEKMDGTEELLVKLNREDLLRKQRTFDNGSIPHQIHL |
| | | GELHAILRRQEDFYPFLKDNREKIEKILTFRIPYYVGPLARGNSRFAW |
| | | MTRKSEETITPWNFEEVVDKGASAQSFIERMTNFDKNLPNEKVLPKH |
| | | SLLYEYFTVYNELTKVKYVTEGMRKPAFLSGEQKKAIVDLLFKTNR |
| | | KVTVKQLKEDYFKKIECFDSVEISGVEDRFNASLGTYHDLLKIIKDKD |
| | | FLDNEENEDILEDIVLTLTLFEDREMIEERLKTYAHLFDDKVMKQLK |
| | | RRRYTGWGRLSRKLINGIRDKQSGKTILDFLKSDGFANRNFMQLIHD |
| | | DSLTFKEDIQKAQVSGQGDSLHEHIANLAGSPAIKKGILQTVKVVDE |
| | | LVKVMGRHKPENIVIEMARENQTTQKGQKNSRERMKRIEEGIKELGS |
| | | QILKEHPVENTQLQNEKLYLYYLQNGRDMYVDQELDINRLSDYDVD |
| | | AIVPQSFLKDDSIDNKVLTRSDKNRGKSDNVPSEEVVKKMKNYWRQ |
| | | LLNAKLITQRKFDNLTKAERGGLSELDKAGFIKRQLVETRQITKHVA |
| | | QILDSRMNTKYDENDKLIREVKVITLKSKLVSDFRKDFQFYKVREIN |
| | | NYHHAHDAYLNAVVGTALIKKYPKLESEFVYGDYKVYDVRKMIAK |
| | | SEQEIGKATAKYFFYSNIMNFFKTEITLANGEIRKRPLIETNGETGEIV |
| | | WDKGRDFATVRKVLSMPQVNIVKKTEVQTGGFSKESILPKRNSDKLI |
| | | ARKKDWDPKKYGGFDSPTVAYSVLVVAKVEKGKSKKLKSVKELLG |
| | | ITIMERSSFEKNPIDFLEAKGYKEVKKDLIIKLPKYSLFELENGRKRML |
| | | ASAGELQKGNELALPSKYVNFLYLASHYEKLKGSPEDNEQKQLFVE |
| | | QHKHYLDEIIEQISEFSKRVILADANLDKVLSAYNKHRDKPIREQAEN |
| | | IIHLFTLTNLGAPAAFKYFDTTIDRKRYTSTKEVLDATLIHQSITGLYE |
| | | TRIDLSQLGGDPKKKRKVGGPSSGAPPPSGGSPAGSPTSTEEGTSESA |
| | | TPESGPGTSTEPSEGSAPGSPAGSPTSTEEGTSTEPSEGSAPGTSTEPSE |
| | | TGNKKKVEEVLEEEEEEYVVEKVLDRRVVKGKVEYLLKWKGFSDE |
| | | DNTWEPEENLDCPDLIAEFLQSQKTAHETDKSEGGKR |
| 1070 | Cas-TRI68 | MGTPKKKRKVMDKKYSIGLAIGTNSVGWAVITDEYKVPSKKFKVLG |
| | | NTDRHSIKKNLIGALLFDSGETAEATRLKRTARRRYTRRKNRICYLQ |
| | | EIFSNEMAKVDDSFFHRLEESFLVEEDKKHERHPIFGNIVDEVAYHEK |
| | | YPTIYHLRKKLVDSTDKADLRLIYLALAHMIKFRGHFLIEGDLNPDNS |
| | | DVDKLFIQLVQTYNQLFEENPINASGVDAKAILSARLSKSRRLENLIA |
| | | QLPGEKKNGLFGNLIALSLGLTPNFKSNFDLAEDAKLQLSKDTYDDD |
| | | LDNLLAQIGDQYADLFLAAKNLSDAILLSDILRVNTEITKAPLSASMI |
| | | KRYDEHHQDLTLLKALVRQQLPEKYKEIFFDQSKNGYAGYIDGGAS |
| | | QEEFYKFIKPILEKMDGTEELLVKLNREDLLRKQRTFDNGSIPHQIHL |
| | | GELHAILRRQEDFYPFLKDNREKIEKILTFRIPYYVGPLARGNSRFAW |
| | | MTRKSEETITPWNFEEVVDKGASAQSFIERMTNFDKNLPNEKVLPKH |
| | | SLLYEYFTVYNELTKVKYVTEGMRKPAFLSGEQKKAIVDLLFKTNR |
| | | KVTVKQLKEDYFKKIECFDSVEISGVEDRFNASLGTYHDLLKIIKDKD |
| | | FLDNEENEDILEDIVLTLTLFEDREMIEERLKTYAHLFDDKVMKQLK |
| | | RRRYTGWGRLSRKLINGIRDKQSGKTILDFLKSDGFANRNFMQLIHD |
| | | DSLTFKEDIQKAQVSGQGDSLHEHIANLAGSPAIKKGILQTVKVVDE |
| | | LVKVMGRHKPENIVIEMARENQTTQKGQKNSRERMKRIEEGIKELGS |
| | | QILKEHPVENTQLQNEKLYLYYLQNGRDMYVDQELDINRLSDYDVD |
| | | AIVPQSFLKDDSIDNKVLTRSDKNRGKSDNVPSEEVVKKMKNYWRQ |
| | | LLNAKLITQRKFDNLTKAERGGLSELDKAGFIKRQLVETRQITKHVA |
| | | QILDSRMNTKYDENDKLIREVKVITLKSKLVSDFRKDFQFYKVREIN |
| | | NYHHAHDAYLNAVVGTALIKKYPKLESEFVYGDYKVYDVRKMIAK |
| | | SEQEIGKATAKYFFYSNIMNFFKTEITLANGEIRKRPLIETNGETGEIV |
| | | WDKGRDFATVRKVLSMPQVNIVKKTEVQTGGFSKESILPKRNSDKLI |
| | | ARKKDWDPKKYGGFDSPTVAYSVLVVAKVEKGKSKKLKSVKELLG |
| | | ITIMERSSFEKNPIDFLEAKGYKEVKKDLIIKLPKYSLFELENGRKRML |
| | | ASAGELQKGNELALPSKYVNFLYLASHYEKLKGSPEDNEQKQLFVE |
| | | QHKHYLDEIIEQISEFSKRVILADANLDKVLSAYNKHRDKPIREQAEN |
| | | IIHLFTLTNLGAPAAFKYFDTTIDRKRYTSTKEVLDATLIHQSITGLYE |
| | | TRIDLSQLGGDPKKKRKVGGPSSGAPPPSGGSPAGSPTSTEEGTSESA |
| | | TPESGPGTSTEPSEGSAPGSPAGSPTSTEEGTSTEPSEGSAPGTSTEPSE |
| | | TGLANVVEKVRLLRLHPGMGLKGDLCERHGEKLKMFCKEDVLIMC |
| | | EACSQSPEHEAHSVVPMEDVAWEYKWELHEALEHLKK |
| 1071 | Cas- | MGTPKKKRKVMDKKYSIGLAIGTNSVGWAVITDEYKVPSKKFKVLG |
| | HXA13 | NTDRHSIKKNLIGALLFDSGETAEATRLKRTARRRYTRRKNRICYLQ |
| | | EIFSNEMAKVDDSFFHRLEESFLVEEDKKHERHPIFGNIVDEVAYHEK |
| | | YPTIYHLRKKLVDSTDKADLRLIYLALAHMIKFRGHFLIEGDLNPDNS |
| | | DVDKLFIQLVQTYNQLFEENPINASGVDAKAILSARLSKSRRLENLIA |
| | | QLPGEKKNGLFGNLIALSLGLTPNFKSNFDLAEDAKLQLSKDTYDDD |
| | | LDNLLAQIGDQYADLFLAAKNLSDAILLSDILRVNTEITKAPLSASMI |
| | | KRYDEHHQDLTLLKALVRQQLPEKYKEIFFDQSKNGYAGYIDGGAS |
| | | QEEFYKFIKPILEKMDGTEELLVKLNREDLLRKQRTFDNGSIPHQIHL |
| | | GELHAILRRQEDFYPFLKDNREKIEKILTFRIPYYVGPLARGNSRFAW |
| | | MTRKSEETITPWNFEEVVDKGASAQSFIERMTNFDKNLPNEKVLPKH |
| | | SLLYEYFTVYNELTKVKYVTEGMRKPAFLSGEQKKAIVDLLFKTNR |
| | | KVTVKQLKEDYFKKIECFDSVEISGVEDRFNASLGTYHDLLKIIKDKD |
| | | FLDNEENEDILEDIVLTLTLFEDREMIEERLKTYAHLFDDKVMKQLK |
| | | RRRYTGWGRLSRKLINGIRDKQSGKTILDFLKSDGFANRNFMQLIHD |
| | | DSLTFKEDIQKAQVSGQGDSLHEHIANLAGSPAIKKGILQTVKVVDE |
| | | LVKVMGRHKPENIVIEMARENQTTQKGQKNSRERMKRIEEGIKELGS |
| | | QILKEHPVENTQLQNEKLYLYYLQNGRDMYVDQELDINRLSDYDVD |
| | | AIVPQSFLKDDSIDNKVLTRSDKNRGKSDNVPSEEVVKKMKNYWRQ |
| | | LLNAKLITQRKFDNLTKAERGGLSELDKAGFIKRQLVETRQITKHVA |
| | | QILDSRMNTKYDENDKLIREVKVITLKSKLVSDFRKDFQFYKVREIN |
| | | NYHHAHDAYLNAVVGTALIKKYPKLESEFVYGDYKVYDVRKMIAK |
| | | SEQEIGKATAKYFFYSNIMNFFKTEITLANGEIRKRPLIETNGETGEIV |
| | | WDKGRDFATVRKVLSMPQVNIVKKTEVQTGGFSKESILPKRNSDKLI |
| | | ARKKDWDPKKYGGFDSPTVAYSVLVVAKVEKGKSKKLKSVKELLG |
| | | ITIMERSSFEKNPIDFLEAKGYKEVKKDLIIKLPKYSLFELENGRKRML |
| | | ASAGELQKGNELALPSKYVNFLYLASHYEKLKGSPEDNEQKQLFVE |
| | | QHKHYLDEIIEQISEFSKRVILADANLDKVLSAYNKHRDKPIREQAEN |
| | | IIHLFTLTNLGAPAAFKYFDTTIDRKRYTSTKEVLDATLIHQSITGLYE |
| | | TRIDLSQLGGDPKKKRKVGGPSSGAPPPSGGSPAGSPTSTEEGTSESA |
| | | TPESGPGTSTEPSEGSAPGSPAGSPTSTEEGTSTEPSEGSAPGTSTEPSE |
| | | TGVVSHPSDASSYRRGRKKRVPYTKVQLKELEREYATNKFITKDKR |
| | | RRISATTNLSERQVTIWFQNRRVKEKKVINKLKTTS |
| 1072 | Cas-PHC3 | MGTPKKKRKVMDKKYSIGLAIGTNSVGWAVITDEYKVPSKKFKVLG |
| | | NTDRHSIKKNLIGALLFDSGETAEATRLKRTARRRYTRRKNRICYLQ |
| | | EIFSNEMAKVDDSFFHRLEESFLVEEDKKHERHPIFGNIVDEVAYHEK |
| | | YPTIYHLRKKLVDSTDKADLRLIYLALAHMIKFRGHFLIEGDLNPDNS |
| | | DVDKLFIQLVQTYNQLFEENPINASGVDAKAILSARLSKSRRLENLIA |
| | | QLPGEKKNGLFGNLIALSLGLTPNFKSNFDLAEDAKLQLSKDTYDDD |
| | | LDNLLAQIGDQYADLFLAAKNLSDAILLSDILRVNTEITKAPLSASMI |
| | | KRYDEHHQDLTLLKALVRQQLPEKYKEIFFDQSKNGYAGYIDGGAS |
| | | QEEFYKFIKPILEKMDGTEELLVKLNREDLLRKQRTFDNGSIPHQIHL |
| | | GELHAILRRQEDFYPFLKDNREKIEKILTFRIPYYVGPLARGNSRFAW |
| | | MTRKSEETITPWNFEEVVDKGASAQSFIERMTNFDKNLPNEKVLPKH |
| | | SLLYEYFTVYNELTKVKYVTEGMRKPAFLSGEQKKAIVDLLFKTNR |
| | | KVTVKQLKEDYFKKIECFDSVEISGVEDRFNASLGTYHDLLKIIKDKD |
| | | FLDNEENEDILEDIVLTLTLFEDREMIEERLKTYAHLFDDKVMKQLK |
| | | RRRYTGWGRLSRKLINGIRDKQSGKTILDFLKSDGFANRNFMQLIHD |
| | | DSLTFKEDIQKAQVSGQGDSLHEHIANLAGSPAIKKGILQTVKVVDE |
| | | LVKVMGRHKPENIVIEMARENQTTQKGQKNSRERMKRIEEGIKELGS |
| | | QILKEHPVENTQLQNEKLYLYYLQNGRDMYVDQELDINRLSDYDVD |
| | | AIVPQSFLKDDSIDNKVLTRSDKNRGKSDNVPSEEVVKKMKNYWRQ |
| | | LLNAKLITQRKFDNLTKAERGGLSELDKAGFIKRQLVETRQITKHVA |
| | | QILDSRMNTKYDENDKLIREVKVITLKSKLVSDFRKDFQFYKVREIN |
| | | NYHHAHDAYLNAVVGTALIKKYPKLESEFVYGDYKVYDVRKMIAK |
| | | SEQEIGKATAKYFFYSNIMNFFKTEITLANGEIRKRPLIETNGETGEIV |
| | | WDKGRDFATVRKVLSMPQVNIVKKTEVQTGGFSKESILPKRNSDKLI |
| | | ARKKDWDPKKYGGFDSPTVAYSVLVVAKVEKGKSKKLKSVKELLG |
| | | ITIMERSSFEKNPIDFLEAKGYKEVKKDLIIKLPKYSLFELENGRKRML |
| | | ASAGELQKGNELALPSKYVNFLYLASHYEKLKGSPEDNEQKQLFVE |
| | | QHKHYLDEIIEQISEFSKRVILADANLDKVLSAYNKHRDKPIREQAEN |
| | | IIHLFTLTNLGAPAAFKYFDTTIDRKRYTSTKEVLDATLIHQSITGLYE |
| | | TRIDLSQLGGDPKKKRKVGGPSSGAPPPSGGSPAGSPTSTEEGTSESA |
| | | TPESGPGTSTEPSEGSAPGSPAGSPTSTEEGTSTEPSEGSAPGTSTEPSE |
| | | TGENSDLLPVAQTEPSIWTVDDVWAFIHSLPGCQDIADEFRAQEIDG |
| | | QALLLLKEDHLMSAMNIKLGPALKICARINSLKES |
| 1073 | Cas-TCF24 | MGTPKKKRKVMDKKYSIGLAIGTNSVGWAVITDEYKVPSKKFKVLG |
| | | NTDRHSIKKNLIGALLFDSGETAEATRLKRTARRRYTRRKNRICYLQ |
| | | EIFSNEMAKVDDSFFHRLEESFLVEEDKKHERHPIFGNIVDEVAYHEK |
| | | YPTIYHLRKKLVDSTDKADLRLIYLALAHMIKFRGHFLIEGDLNPDNS |
| | | DVDKLFIQLVQTYNQLFEENPINASGVDAKAILSARLSKSRRLENLIA |
| | | QLPGEKKNGLFGNLIALSLGLTPNFKSNFDLAEDAKLQLSKDTYDDD |
| | | LDNLLAQIGDQYADLFLAAKNLSDAILLSDILRVNTEITKAPLSASMI |
| | | KRYDEHHQDLTLLKALVRQQLPEKYKEIFFDQSKNGYAGYIDGGAS |
| | | QEEFYKFIKPILEKMDGTEELLVKLNREDLLRKQRTFDNGSIPHQIHL |
| | | GELHAILRRQEDFYPFLKDNREKIEKILTFRIPYYVGPLARGNSRFAW |
| | | MTRKSEETITPWNFEEVVDKGASAQSFIERMTNFDKNLPNEKVLPKH |
| | | SLLYEYFTVYNELTKVKYVTEGMRKPAFLSGEQKKAIVDLLFKTNR |
| | | KVTVKQLKEDYFKKIECFDSVEISGVEDRFNASLGTYHDLLKIIKDKD |
| | | FLDNEENEDILEDIVLTLTLFEDREMIEERLKTYAHLFDDKVMKQLK |
| | | RRRYTGWGRLSRKLINGIRDKQSGKTILDFLKSDGFANRNFMQLIHD |
| | | DSLTFKEDIQKAQVSGQGDSLHEHIANLAGSPAIKKGILQTVKVVDE |
| | | LVKVMGRHKPENIVIEMARENQTTQKGQKNSRERMKRIEEGIKELGS |
| | | QILKEHPVENTQLQNEKLYLYYLQNGRDMYVDQELDINRLSDYDVD |
| | | AIVPQSFLKDDSIDNKVLTRSDKNRGKSDNVPSEEVVKKMKNYWRQ |
| | | LLNAKLITQRKFDNLTKAERGGLSELDKAGFIKRQLVETRQITKHVA |
| | | QILDSRMNTKYDENDKLIREVKVITLKSKLVSDFRKDFQFYKVREIN |
| | | NYHHAHDAYLNAVVGTALIKKYPKLESEFVYGDYKVYDVRKMIAK |
| | | SEQEIGKATAKYFFYSNIMNFFKTEITLANGEIRKRPLIETNGETGEIV |
| | | WDKGRDFATVRKVLSMPQVNIVKKTEVQTGGFSKESILPKRNSDKLI |
| | | ARKKDWDPKKYGGFDSPTVAYSVLVVAKVEKGKSKKLKSVKELLG |
| | | ITIMERSSFEKNPIDFLEAKGYKEVKKDLIIKLPKYSLFELENGRKRML |
| | | ASAGELQKGNELALPSKYVNFLYLASHYEKLKGSPEDNEQKQLFVE |
| | | QHKHYLDEIIEQISEFSKRVILADANLDKVLSAYNKHRDKPIREQAEN |
| | | IIHLFTLTNLGAPAAFKYFDTTIDRKRYTSTKEVLDATLIHQSITGLYE |
| | | TRIDLSQLGGDPKKKRKVGGPSSGAPPPSGGSPAGSPTSTEEGTSESA |
| | | TPESGPGTSTEPSEGSAPGSPAGSPTSTEEGTSTEPSEGSAPGTSTEPSE |
| | | TGAGPGGGSRSGSGRPAAANAARERSRVQTLRHAFLELQRTLPSVPP |
| | | DTKLSKLDVLLLATTYIAHLTRSLQDDAEAPADAG |
| 1074 | Cas- | MGTPKKKRKVMDKKYSIGLAIGTNSVGWAVITDEYKVPSKKFKVLG |
| | HXB13 | NTDRHSIKKNLIGALLFDSGETAEATRLKRTARRRYTRRKNRICYLQ |
| | | EIFSNEMAKVDDSFFHRLEESFLVEEDKKHERHPIFGNIVDEVAYHEK |
| | | YPTIYHLRKKLVDSTDKADLRLIYLALAHMIKFRGHFLIEGDLNPDNS |
| | | DVDKLFIQLVQTYNQLFEENPINASGVDAKAILSARLSKSRRLENLIA |
| | | QLPGEKKNGLFGNLIALSLGLTPNFKSNFDLAEDAKLQLSKDTYDDD |
| | | LDNLLAQIGDQYADLFLAAKNLSDAILLSDILRVNTEITKAPLSASMI |
| | | KRYDEHHQDLTLLKALVRQQLPEKYKEIFFDQSKNGYAGYIDGGAS |
| | | QEEFYKFIKPILEKMDGTEELLVKLNREDLLRKQRTFDNGSIPHQIHL |
| | | GELHAILRRQEDFYPFLKDNREKIEKILTFRIPYYVGPLARGNSRFAW |
| | | MTRKSEETITPWNFEEVVDKGASAQSFIERMTNFDKNLPNEKVLPKH |
| | | SLLYEYFTVYNELTKVKYVTEGMRKPAFLSGEQKKAIVDLLFKTNR |
| | | KVTVKQLKEDYFKKIECFDSVEISGVEDRFNASLGTYHDLLKIIKDKD |
| | | FLDNEENEDILEDIVLTLTLFEDREMIEERLKTYAHLFDDKVMKQLK |
| | | RRRYTGWGRLSRKLINGIRDKQSGKTILDFLKSDGFANRNFMQLIHD |
| | | DSLTFKEDIQKAQVSGQGDSLHEHIANLAGSPAIKKGILQTVKVVDE |
| | | LVKVMGRHKPENIVIEMARENQTTQKGQKNSRERMKRIEEGIKELGS |
| | | QILKEHPVENTQLQNEKLYLYYLQNGRDMYVDQELDINRLSDYDVD |
| | | AIVPQSFLKDDSIDNKVLTRSDKNRGKSDNVPSEEVVKKMKNYWRQ |
| | | LLNAKLITQRKFDNLTKAERGGLSELDKAGFIKRQLVETRQITKHVA |
| | | QILDSRMNTKYDENDKLIREVKVITLKSKLVSDFRKDFQFYKVREIN |
| | | NYHHAHDAYLNAVVGTALIKKYPKLESEFVYGDYKVYDVRKMIAK |
| | | SEQEIGKATAKYFFYSNIMNFFKTEITLANGEIRKRPLIETNGETGEIV |
| | | WDKGRDFATVRKVLSMPQVNIVKKTEVQTGGFSKESILPKRNSDKLI |
| | | ARKKDWDPKKYGGFDSPTVAYSVLVVAKVEKGKSKKLKSVKELLG |
| | | ITIMERSSFEKNPIDFLEAKGYKEVKKDLIIKLPKYSLFELENGRKRML |
| | | ASAGELQKGNELALPSKYVNFLYLASHYEKLKGSPEDNEQKQLFVE |
| | | QHKHYLDEIIEQISEFSKRVILADANLDKVLSAYNKHRDKPIREQAEN |
| | | IIHLFTLTNLGAPAAFKYFDTTIDRKRYTSTKEVLDATLIHQSITGLYE |
| | | TRIDLSQLGGDPKKKRKVGGPSSGAPPPSGGSPAGSPTSTEEGTSESA |
| | | TPESGPGTSTEPSEGSAPGSPAGSPTSTEEGTSTEPSEGSAPGTSTEPSE |
| | | TGQHPPDACAFRRGRKKRIPYSKGQLRELEREYAANKFITKDKRRKI |
| | | SAATSLSERQITIWFQNRRVKEKKVLAKVKNSATP |
| 1075 | Cas-HEY1 | MGTPKKKRKVMDKKYSIGLAIGTNSVGWAVITDEYKVPSKKFKVLG |
| | | NTDRHSIKKNLIGALLFDSGETAEATRLKRTARRRYTRRKNRICYLQ |
| | | EIFSNEMAKVDDSFFHRLEESFLVEEDKKHERHPIFGNIVDEVAYHEK |
| | | YPTIYHLRKKLVDSTDKADLRLIYLALAHMIKFRGHFLIEGDLNPDNS |
| | | DVDKLFIQLVQTYNQLFEENPINASGVDAKAILSARLSKSRRLENLIA |
| | | QLPGEKKNGLFGNLIALSLGLTPNFKSNFDLAEDAKLQLSKDTYDDD |
| | | LDNLLAQIGDQYADLFLAAKNLSDAILLSDILRVNTEITKAPLSASMI |
| | | KRYDEHHQDLTLLKALVRQQLPEKYKEIFFDQSKNGYAGYIDGGAS |
| | | QEEFYKFIKPILEKMDGTEELLVKLNREDLLRKQRTFDNGSIPHQIHL |
| | | GELHAILRRQEDFYPFLKDNREKIEKILTFRIPYYVGPLARGNSRFAW |
| | | MTRKSEETITPWNFEEVVDKGASAQSFIERMTNFDKNLPNEKVLPKH |
| | | SLLYEYFTVYNELTKVKYVTEGMRKPAFLSGEQKKAIVDLLFKTNR |
| | | KVTVKQLKEDYFKKIECFDSVEISGVEDRFNASLGTYHDLLKIIKDKD |
| | | FLDNEENEDILEDIVLTLTLFEDREMIEERLKTYAHLFDDKVMKQLK |
| | | RRRYTGWGRLSRKLINGIRDKQSGKTILDFLKSDGFANRNFMQLIHD |
| | | DSLTFKEDIQKAQVSGQGDSLHEHIANLAGSPAIKKGILQTVKVVDE |
| | | LVKVMGRHKPENIVIEMARENQTTQKGQKNSRERMKRIEEGIKELGS |
| | | QILKEHPVENTQLQNEKLYLYYLQNGRDMYVDQELDINRLSDYDVD |
| | | AIVPQSFLKDDSIDNKVLTRSDKNRGKSDNVPSEEVVKKMKNYWRQ |
| | | LLNAKLITQRKFDNLTKAERGGLSELDKAGFIKRQLVETRQITKHVA |
| | | QILDSRMNTKYDENDKLIREVKVITLKSKLVSDFRKDFQFYKVREIN |
| | | NYHHAHDAYLNAVVGTALIKKYPKLESEFVYGDYKVYDVRKMIAK |
| | | SEQEIGKATAKYFFYSNIMNFFKTEITLANGEIRKRPLIETNGETGEIV |
| | | WDKGRDFATVRKVLSMPQVNIVKKTEVQTGGFSKESILPKRNSDKLI |
| | | ARKKDWDPKKYGGFDSPTVAYSVLVVAKVEKGKSKKLKSVKELLG |
| | | ITIMERSSFEKNPIDFLEAKGYKEVKKDLIIKLPKYSLFELENGRKRML |
| | | ASAGELQKGNELALPSKYVNFLYLASHYEKLKGSPEDNEQKQLFVE |
| | | QHKHYLDEIIEQISEFSKRVILADANLDKVLSAYNKHRDKPIREQAEN |
| | | IIHLFTLTNLGAPAAFKYFDTTIDRKRYTSTKEVLDATLIHQSITGLYE |
| | | TRIDLSQLGGDPKKKRKVGGPSSGAPPPSGGSPAGSPTSTEEGTSESA |
| | | TPESGPGTSTEPSEGSAPGSPAGSPTSTEEGTSTEPSEGSAPGTSTEPSE |
| | | TGSMSPTTSSQILARKRRRGIIEKRRRDRINNSLSELRRLVPSAFEKQG |
| | | SAKLEKAEILQMTVDHLKMLHTAGGKGYFDAHA |
| 1076 | Cas-PHC2 | MGTPKKKRKVMDKKYSIGLAIGTNSVGWAVITDEYKVPSKKFKVLG |
| | | NTDRHSIKKNLIGALLFDSGETAEATRLKRTARRRYTRRKNRICYLQ |
| | | EIFSNEMAKVDDSFFHRLEESFLVEEDKKHERHPIFGNIVDEVAYHEK |
| | | YPTIYHLRKKLVDSTDKADLRLIYLALAHMIKFRGHFLIEGDLNPDNS |
| | | DVDKLFIQLVQTYNQLFEENPINASGVDAKAILSARLSKSRRLENLIA |
| | | QLPGEKKNGLFGNLIALSLGLTPNFKSNFDLAEDAKLQLSKDTYDDD |
| | | LDNLLAQIGDQYADLFLAAKNLSDAILLSDILRVNTEITKAPLSASMI |
| | | KRYDEHHQDLTLLKALVRQQLPEKYKEIFFDQSKNGYAGYIDGGAS |
| | | QEEFYKFIKPILEKMDGTEELLVKLNREDLLRKQRTFDNGSIPHQIHL |
| | | GELHAILRRQEDFYPFLKDNREKIEKILTFRIPYYVGPLARGNSRFAW |
| | | MTRKSEETITPWNFEEVVDKGASAQSFIERMTNFDKNLPNEKVLPKH |
| | | SLLYEYFTVYNELTKVKYVTEGMRKPAFLSGEQKKAIVDLLFKTNR |
| | | KVTVKQLKEDYFKKIECFDSVEISGVEDRFNASLGTYHDLLKIIKDKD |
| | | FLDNEENEDILEDIVLTLTLFEDREMIEERLKTYAHLFDDKVMKQLK |
| | | RRRYTGWGRLSRKLINGIRDKQSGKTILDFLKSDGFANRNFMQLIHD |
| | | DSLTFKEDIQKAQVSGQGDSLHEHIANLAGSPAIKKGILQTVKVVDE |
| | | LVKVMGRHKPENIVIEMARENQTTQKGQKNSRERMKRIEEGIKELGS |
| | | QILKEHPVENTQLQNEKLYLYYLQNGRDMYVDQELDINRLSDYDVD |
| | | AIVPQSFLKDDSIDNKVLTRSDKNRGKSDNVPSEEVVKKMKNYWRQ |
| | | LLNAKLITQRKFDNLTKAERGGLSELDKAGFIKRQLVETRQITKHVA |
| | | QILDSRMNTKYDENDKLIREVKVITLKSKLVSDFRKDFQFYKVREIN |
| | | NYHHAHDAYLNAVVGTALIKKYPKLESEFVYGDYKVYDVRKMIAK |
| | | SEQEIGKATAKYFFYSNIMNFFKTEITLANGEIRKRPLIETNGETGEIV |
| | | WDKGRDFATVRKVLSMPQVNIVKKTEVQTGGFSKESILPKRNSDKLI |
| | | ARKKDWDPKKYGGFDSPTVAYSVLVVAKVEKGKSKKLKSVKELLG |
| | | ITIMERSSFEKNPIDFLEAKGYKEVKKDLIIKLPKYSLFELENGRKRML |
| | | ASAGELQKGNELALPSKYVNFLYLASHYEKLKGSPEDNEQKQLFVE |
| | | QHKHYLDEIIEQISEFSKRVILADANLDKVLSAYNKHRDKPIREQAEN |
| | | IIHLFTLTNLGAPAAFKYFDTTIDRKRYTSTKEVLDATLIHQSITGLYE |
| | | TRIDLSQLGGDPKKKRKVGGPSSGAPPPSGGSPAGSPTSTEEGTSESA |
| | | TPESGPGTSTEPSEGSAPGSPAGSPTSTEEGTSTEPSEGSAPGTSTEPSE |
| | | TGLVGMGHHFLPSEPTKWNVEDVYEFIRSLPGCQEIAEEFRAQEIDG |
| | | QALLLLKEDHLMSAMNIKLGPALKIYARISMLKDS |
| 1077 | Cas- | MGTPKKKRKVMDKKYSIGLAIGTNSVGWAVITDEYKVPSKKFKVLG |
| | FIGLA | NTDRHSIKKNLIGALLFDSGETAEATRLKRTARRRYTRRKNRICYLQ |
| | | EIFSNEMAKVDDSFFHRLEESFLVEEDKKHERHPIFGNIVDEVAYHEK |
| | | YPTIYHLRKKLVDSTDKADLRLIYLALAHMIKFRGHFLIEGDLNPDNS |
| | | DVDKLFIQLVQTYNQLFEENPINASGVDAKAILSARLSKSRRLENLIA |
| | | QLPGEKKNGLFGNLIALSLGLTPNFKSNFDLAEDAKLQLSKDTYDDD |
| | | LDNLLAQIGDQYADLFLAAKNLSDAILLSDILRVNTEITKAPLSASMI |
| | | KRYDEHHQDLTLLKALVRQQLPEKYKEIFFDQSKNGYAGYIDGGAS |
| | | QEEFYKFIKPILEKMDGTEELLVKLNREDLLRKQRTFDNGSIPHQIHL |
| | | GELHAILRRQEDFYPFLKDNREKIEKILTFRIPYYVGPLARGNSRFAW |
| | | MTRKSEETITPWNFEEVVDKGASAQSFIERMTNFDKNLPNEKVLPKH |
| | | SLLYEYFTVYNELTKVKYVTEGMRKPAFLSGEQKKAIVDLLFKTNR |
| | | KVTVKQLKEDYFKKIECFDSVEISGVEDRFNASLGTYHDLLKIIKDKD |
| | | FLDNEENEDILEDIVLTLTLFEDREMIEERLKTYAHLFDDKVMKQLK |
| | | RRRYTGWGRLSRKLINGIRDKQSGKTILDFLKSDGFANRNFMQLIHD |
| | | DSLTFKEDIQKAQVSGQGDSLHEHIANLAGSPAIKKGILQTVKVVDE |
| | | LVKVMGRHKPENIVIEMARENQTTQKGQKNSRERMKRIEEGIKELGS |
| | | QILKEHPVENTQLQNEKLYLYYLQNGRDMYVDQELDINRLSDYDVD |
| | | AIVPQSFLKDDSIDNKVLTRSDKNRGKSDNVPSEEVVKKMKNYWRQ |
| | | LLNAKLITQRKFDNLTKAERGGLSELDKAGFIKRQLVETRQITKHVA |
| | | QILDSRMNTKYDENDKLIREVKVITLKSKLVSDFRKDFQFYKVREIN |
| | | NYHHAHDAYLNAVVGTALIKKYPKLESEFVYGDYKVYDVRKMIAK |
| | | SEQEIGKATAKYFFYSNIMNFFKTEITLANGEIRKRPLIETNGETGEIV |
| | | WDKGRDFATVRKVLSMPQVNIVKKTEVQTGGFSKESILPKRNSDKLI |
| | | ARKKDWDPKKYGGFDSPTVAYSVLVVAKVEKGKSKKLKSVKELLG |
| | | ITIMERSSFEKNPIDFLEAKGYKEVKKDLIIKLPKYSLFELENGRKRML |
| | | ASAGELQKGNELALPSKYVNFLYLASHYEKLKGSPEDNEQKQLFVE |
| | | QHKHYLDEIIEQISEFSKRVILADANLDKVLSAYNKHRDKPIREQAEN |
| | | IIHLFTLTNLGAPAAFKYFDTTIDRKRYTSTKEVLDATLIHQSITGLYE |
| | | TRIDLSQLGGDPKKKRKVGGPSSGAPPPSGGSPAGSPTSTEEGTSESA |
| | | TPESGPGTSTEPSEGSAPGSPAGSPTSTEEGTSTEPSEGSAPGTSTEPSE |
| | | TGGYSSTENLQLVLERRRVANAKERERIKNLNRGFARLKALVPFLPQ |
| | | SRKPSKVDILKGATEYIQVLSDLLEGAKDSKKQDP |
| 1078 | Cas- | MGTPKKKRKVMDKKYSIGLAIGTNSVGWAVITDEYKVPSKKFKVLG |
| | SetDB1 | NTDRHSIKKNLIGALLFDSGETAEATRLKRTARRRYTRRKNRICYLQ |
| | | EIFSNEMAKVDDSFFHRLEESFLVEEDKKHERHPIFGNIVDEVAYHEK |
| | | YPTIYHLRKKLVDSTDKADLRLIYLALAHMIKFRGHFLIEGDLNPDNS |
| | | DVDKLFIQLVQTYNQLFEENPINASGVDAKAILSARLSKSRRLENLIA |
| | | QLPGEKKNGLFGNLIALSLGLTPNFKSNFDLAEDAKLQLSKDTYDDD |
| | | LDNLLAQIGDQYADLFLAAKNLSDAILLSDILRVNTEITKAPLSASMI |
| | | KRYDEHHQDLTLLKALVRQQLPEKYKEIFFDQSKNGYAGYIDGGAS |
| | | QEEFYKFIKPILEKMDGTEELLVKLNREDLLRKQRTFDNGSIPHQIHL |
| | | GELHAILRRQEDFYPFLKDNREKIEKILTFRIPYYVGPLARGNSRFAW |
| | | MTRKSEETITPWNFEEVVDKGASAQSFIERMTNFDKNLPNEKVLPKH |
| | | SLLYEYFTVYNELTKVKYVTEGMRKPAFLSGEQKKAIVDLLFKTNR |
| | | KVTVKQLKEDYFKKIECFDSVEISGVEDRFNASLGTYHDLLKIIKDKD |
| | | FLDNEENEDILEDIVLTLTLFEDREMIEERLKTYAHLFDDKVMKQLK |
| | | RRRYTGWGRLSRKLINGIRDKQSGKTILDFLKSDGFANRNFMQLIHD |
| | | DSLTFKEDIQKAQVSGQGDSLHEHIANLAGSPAIKKGILQTVKVVDE |
| | | LVKVMGRHKPENIVIEMARENQTTQKGQKNSRERMKRIEEGIKELGS |
| | | QILKEHPVENTQLQNEKLYLYYLQNGRDMYVDQELDINRLSDYDVD |
| | | AIVPQSFLKDDSIDNKVLTRSDKNRGKSDNVPSEEVVKKMKNYWRQ |
| | | LLNAKLITQRKFDNLTKAERGGLSELDKAGFIKRQLVETRQITKHVA |
| | | QILDSRMNTKYDENDKLIREVKVITLKSKLVSDFRKDFQFYKVREIN |
| | | NYHHAHDAYLNAVVGTALIKKYPKLESEFVYGDYKVYDVRKMIAK |
| | | SEQEIGKATAKYFFYSNIMNFFKTEITLANGEIRKRPLIETNGETGEIV |
| | | WDKGRDFATVRKVLSMPQVNIVKKTEVQTGGFSKESILPKRNSDKLI |
| | | ARKKDWDPKKYGGFDSPTVAYSVLVVAKVEKGKSKKLKSVKELLG |
| | | ITIMERSSFEKNPIDFLEAKGYKEVKKDLIIKLPKYSLFELENGRKRML |
| | | ASAGELQKGNELALPSKYVNFLYLASHYEKLKGSPEDNEQKQLFVE |
| | | QHKHYLDEIIEQISEFSKRVILADANLDKVLSAYNKHRDKPIREQAEN |
| | | IIHLFTLTNLGAPAAFKYFDTTIDRKRYTSTKEVLDATLIHQSITGLYE |
| | | TRIDLSQLGGDPKKKRKVGGPSSGAPPPSGGSPAGSPTSTEEGTSESA |
| | | TPESGPGTSTEPSEGSAPGSPAGSPTSTEEGTSTEPSEGSAPGTSTEPSE |
| | | TGMSSLPGCIGLDAATATVESEEIAELQQAVVEELGISMEELRHFIDE |
| | | ELEKMDCVQQRKKQLAELETWVIQKESEVAHVDQLFDDASRAVTN |
| | | CESLVKDFYSKLGLQYRDSSSEDESSRPTEIIEIPDEDDDVLSIDSGDA |
| | | GSRTPKDQKLREAMAALRKSAQDVQKFMDAVNKKSSSQDLHKGTL |
| | | SQMSGELSKDGDLIVSMRILGKKRTKTWHKGTLIAIQTVGPGKKYK |
| | | VKFDNKGKSLLSGNHIAYDYHPPADKLYVGSRVVAKYKDGNQVWL |
| | | YAGIVAETPNVKNKLRFLIFFDDGYASYVTQSELYPICRPLKKTWEDI |
| | | EDISCRDFIEEYVTAYPNRPMVLLKSGQLIKTEWEGTWWKSRVEEV |
| | | DGSLVRILFLDDKRCEWIYRGSTRLEPMFSMKTSSASALEKKQGQLR |
| | | TRPNMGAVRSKGPVVQYTQDLTGTGTQFKPVEPPQPTAPPAPPFPPA |
| | | PPLSPQAGDSDLESQLAQSRKQVAKKSTSFRPGSVGSGHSSPTSPALS |
| | | ENVSGGKPGINQTYRSPLGSTASAPAPSALPAPPAPPVFHGMLERAPA |
| | | EPSYRAPMEKLFYLPHVCSYTCLSRVRPMRNEQYRGKNPLLVPLLY |
| | | DFRRMTARRRVNRKMGFHVIYKTPCGLCLRTMQEIERYLFETGCDF |
| | | LFLEMFCLDPYVLVDRKFQPYKPFYYILDITYGKEDVPLSCVNEIDTT |
| | | PPPQVAYSKERIPGKGVFINTGPEFLVGCDCKDGCRDKSKCACHQLT |
| | | IQATACTPGGQINPNSGYQYKRLEECLPTGVYECNKRCKCDPNMCT |
| | | NRLVQHGLQVRLQLFKTQNKGWGIRCLDDIAKGSFVCIYAGKILTD |
| | | DFADKEGLEMGDEYFANLDHIESVENFKEGYESDAPCSSDSSGVDLK |
| | | DQEDGNSGTEDPEESNDDSSDDNFCKDEDFSTSSVWRSYATRRQTR |
| | | GQKENGLSETTSKDSHPPDLGPPHIPVPPSIPVGGCNPPSSEETPKNKV |
| | | ASWLSCNSVSEGGFADSDSHSSFKTNEGGEGRAGGSRMEAEKASTS |
| | | GLGIKDEGDIKQAKKEDTDDRNKMSVVTESSRNYGYNPSPVKPEGL |
| | | RRPPSKTSMHQSRRLMASAQSNPDDVLTLSSSTESEGESGTSRKPTA |
| | | GQTSATAVDSDDIQTISSGSEGDDFEDKKNMTGPMKRQVAVKSTRG |
| | | FALKSTHGIAIKSTNMASVDKGESAPVRKNTRQFYDGEESCYIIDAKL |
| | | EGNLGRYLNHSCSPNLFVQNVFVDTHDLRFPWVAFFASKRIRAGTEL |
| | | TWDYNYEVGSVEGKELLCCCGAIECRGRLL |
| 1079 | Cas-MBD1 | MGTPKKKRKVMDKKYSIGLAIGTNSVGWAVITDEYKVPSKKFKVLG |
| | | NTDRHSIKKNLIGALLFDSGETAEATRLKRTARRRYTRRKNRICYLQ |
| | | EIFSNEMAKVDDSFFHRLEESFLVEEDKKHERHPIFGNIVDEVAYHEK |
| | | YPTIYHLRKKLVDSTDKADLRLIYLALAHMIKFRGHFLIEGDLNPDNS |
| | | DVDKLFIQLVQTYNQLFEENPINASGVDAKAILSARLSKSRRLENLIA |
| | | QLPGEKKNGLFGNLIALSLGLTPNFKSNFDLAEDAKLQLSKDTYDDD |
| | | LDNLLAQIGDQYADLFLAAKNLSDAILLSDILRVNTEITKAPLSASMI |
| | | KRYDEHHQDLTLLKALVRQQLPEKYKEIFFDQSKNGYAGYIDGGAS |
| | | QEEFYKFIKPILEKMDGTEELLVKLNREDLLRKQRTFDNGSIPHQIHL |
| | | GELHAILRRQEDFYPFLKDNREKIEKILTFRIPYYVGPLARGNSRFAW |
| | | MTRKSEETITPWNFEEVVDKGASAQSFIERMTNFDKNLPNEKVLPKH |
| | | SLLYEYFTVYNELTKVKYVTEGMRKPAFLSGEQKKAIVDLLFKTNR |
| | | KVTVKQLKEDYFKKIECFDSVEISGVEDRFNASLGTYHDLLKIIKDKD |
| | | FLDNEENEDILEDIVLTLTLFEDREMIEERLKTYAHLFDDKVMKQLK |
| | | RRRYTGWGRLSRKLINGIRDKQSGKTILDFLKSDGFANRNFMQLIHD |
| | | DSLTFKEDIQKAQVSGQGDSLHEHIANLAGSPAIKKGILQTVKVVDE |
| | | LVKVMGRHKPENIVIEMARENQTTQKGQKNSRERMKRIEEGIKELGS |
| | | QILKEHPVENTQLQNEKLYLYYLQNGRDMYVDQELDINRLSDYDVD |
| | | AIVPQSFLKDDSIDNKVLTRSDKNRGKSDNVPSEEVVKKMKNYWRQ |
| | | LLNAKLITQRKFDNLTKAERGGLSELDKAGFIKRQLVETRQITKHVA |
| | | QILDSRMNTKYDENDKLIREVKVITLKSKLVSDFRKDFQFYKVREIN |
| | | NYHHAHDAYLNAVVGTALIKKYPKLESEFVYGDYKVYDVRKMIAK |
| | | SEQEIGKATAKYFFYSNIMNFFKTEITLANGEIRKRPLIETNGETGEIV |
| | | WDKGRDFATVRKVLSMPQVNIVKKTEVQTGGFSKESILPKRNSDKLI |
| | | ARKKDWDPKKYGGFDSPTVAYSVLVVAKVEKGKSKKLKSVKELLG |
| | | ITIMERSSFEKNPIDFLEAKGYKEVKKDLIIKLPKYSLFELENGRKRML |
| | | ASAGELQKGNELALPSKYVNFLYLASHYEKLKGSPEDNEQKQLFVE |
| | | QHKHYLDEIIEQISEFSKRVILADANLDKVLSAYNKHRDKPIREQAEN |
| | | IIHLFTLTNLGAPAAFKYFDTTIDRKRYTSTKEVLDATLIHQSITGLYE |
| | | TRIDLSQLGGDPKKKRKVGGPSSGAPPPSGGSPAGSPTSTEEGTSESA |
| | | TPESGPGTSTEPSEGSAPGSPAGSPTSTEEGTSTEPSEGSAPGTSTEPSE |
| | | TGMAEDWLDCPALGPGWKRREVFRKSGATCGRSDTYYQSPTGDRI |
| | | RSKVELTRYLGPACDLTLFDFKQGILCYPAPKAHPVAVASKKRKKPS |
| | | RPAKTRKRQVGPQSGEVRKEAPRDETKADTDTAPASFPAPGCCENC |
| | | GISFSGDGTQRQRLKTLCKDCRAQRIAFNREQRMFKRVGCGECAAC |
| | | QVTEDCGACSTCLLQLPHDVASGLFCKCERRRCLRIVERSRGCGVCR |
| | | GCQTQEDCGHCPICLRPPRPGLRRQWKCVQRRCLRGKHARRKGGC |
| | | DSKMAARRRPGAQPLPPPPPSQSPEPTEPHPRALAPSPPAEFIYYCVD |
| | | EDELQPYTNRRQNRKCGACAACLRRMDCGRCDFCCDKPKFGGSNQ |
| | | KRQKCRWRQCLQFAMKRLLPSVWSESEDGAGSPPPYRRRKRPSSAR |
| | | RHHLGPTLKPTLATRTAQPDHTQAPTKQEAGGGFVLPPPGTDLVFLR |
| | | EGASSPVQVPGPVAASTEALLQEAQCSGLSWVVALPQVKQEKADTQ |
| | | DEWTPGTAVLTSPVLVPGCPSKAVDPGLPSVKQEPPDPEEDKEENKD |
| | | DSASKLAPEEEAGGAGTPVITEIFSLGGTRFRDTAVWLPRSKDLKKP |
| | | GARKQ |
| 1080 | Cas-MBD2 | MGTPKKKRKVMDKKYSIGLAIGTNSVGWAVITDEYKVPSKKFKVLG |
| | | NTDRHSIKKNLIGALLFDSGETAEATRLKRTARRRYTRRKNRICYLQ |
| | | EIFSNEMAKVDDSFFHRLEESFLVEEDKKHERHPIFGNIVDEVAYHEK |
| | | YPTIYHLRKKLVDSTDKADLRLIYLALAHMIKFRGHFLIEGDLNPDNS |
| | | DVDKLFIQLVQTYNQLFEENPINASGVDAKAILSARLSKSRRLENLIA |
| | | QLPGEKKNGLFGNLIALSLGLTPNFKSNFDLAEDAKLQLSKDTYDDD |
| | | LDNLLAQIGDQYADLFLAAKNLSDAILLSDILRVNTEITKAPLSASMI |
| | | KRYDEHHQDLTLLKALVRQQLPEKYKEIFFDQSKNGYAGYIDGGAS |
| | | QEEFYKFIKPILEKMDGTEELLVKLNREDLLRKQRTFDNGSIPHQIHL |
| | | GELHAILRRQEDFYPFLKDNREKIEKILTFRIPYYVGPLARGNSRFAW |
| | | MTRKSEETITPWNFEEVVDKGASAQSFIERMTNFDKNLPNEKVLPKH |
| | | SLLYEYFTVYNELTKVKYVTEGMRKPAFLSGEQKKAIVDLLFKTNR |
| | | KVTVKQLKEDYFKKIECFDSVEISGVEDRFNASLGTYHDLLKIIKDKD |
| | | FLDNEENEDILEDIVLTLTLFEDREMIEERLKTYAHLFDDKVMKQLK |
| | | RRRYTGWGRLSRKLINGIRDKQSGKTILDFLKSDGFANRNFMQLIHD |
| | | DSLTFKEDIQKAQVSGQGDSLHEHIANLAGSPAIKKGILQTVKVVDE |
| | | LVKVMGRHKPENIVIEMARENQTTQKGQKNSRERMKRIEEGIKELGS |
| | | QILKEHPVENTQLQNEKLYLYYLQNGRDMYVDQELDINRLSDYDVD |
| | | AIVPQSFLKDDSIDNKVLTRSDKNRGKSDNVPSEEVVKKMKNYWRQ |
| | | LLNAKLITQRKFDNLTKAERGGLSELDKAGFIKRQLVETRQITKHVA |
| | | QILDSRMNTKYDENDKLIREVKVITLKSKLVSDFRKDFQFYKVREIN |
| | | NYHHAHDAYLNAVVGTALIKKYPKLESEFVYGDYKVYDVRKMIAK |
| | | SEQEIGKATAKYFFYSNIMNFFKTEITLANGEIRKRPLIETNGETGEIV |
| | | WDKGRDFATVRKVLSMPQVNIVKKTEVQTGGFSKESILPKRNSDKLI |
| | | ARKKDWDPKKYGGFDSPTVAYSVLVVAKVEKGKSKKLKSVKELLG |
| | | ITIMERSSFEKNPIDFLEAKGYKEVKKDLIIKLPKYSLFELENGRKRML |
| | | ASAGELQKGNELALPSKYVNFLYLASHYEKLKGSPEDNEQKQLFVE |
| | | QHKHYLDEIIEQISEFSKRVILADANLDKVLSAYNKHRDKPIREQAEN |
| | | IIHLFTLTNLGAPAAFKYFDTTIDRKRYTSTKEVLDATLIHQSITGLYE |
| | | TRIDLSQLGGDPKKKRKVGGPSSGAPPPSGGSPAGSPTSTEEGTSESA |
| | | TPESGPGTSTEPSEGSAPGSPAGSPTSTEEGTSTEPSEGSAPGTSTEPSE |
| | | TGMRAHPGGGRCCPEQEEGESAAGGSGAGGDSAIEQGGQGSALAPS |
| | | PVSGVRREGARGGGRGRGRWKQAGRGGGVCGRGRGRGRGRGRGR |
| | | GRGRGRGRPPSGGSGLGGDGGGCGGGGSGGGGAPRREPVPFPSGSA |
| | | GPGPRGPRATESGKRMDCPALPPGWKKEEVIRKSGLSAGKSDVYYF |
| | | SPSGKKFRSKPQLARYLGNTVDLSSFDFRTGKMMPSKLQKNKQRLR |
| | | NDPLNQNKGKPDLNTTLPIRQTASIFKQPVTKVTNHPSNKVKSDPQR |
| | | MNEQPRQLFWEKRLQGLSASDVTEQIIKTMELPKGLQGVGPGSNDE |
| | | TLLSAVASALHTSSAPITGQVSAAVEKNPAVWLNTSQPLCKAFIVTD |
| | | EDIRKQEERVQQVRKKLEEALMADILSRAADTEEMDIEMDSGDEA |
| 1081 | Cas-MBD3 | MGTPKKKRKVMDKKYSIGLAIGTNSVGWAVITDEYKVPSKKFKVLG |
| | | NTDRHSIKKNLIGALLFDSGETAEATRLKRTARRRYTRRKNRICYLQ |
| | | EIFSNEMAKVDDSFFHRLEESFLVEEDKKHERHPIFGNIVDEVAYHEK |
| | | YPTIYHLRKKLVDSTDKADLRLIYLALAHMIKFRGHFLIEGDLNPDNS |
| | | DVDKLFIQLVQTYNQLFEENPINASGVDAKAILSARLSKSRRLENLIA |
| | | QLPGEKKNGLFGNLIALSLGLTPNFKSNFDLAEDAKLQLSKDTYDDD |
| | | LDNLLAQIGDQYADLFLAAKNLSDAILLSDILRVNTEITKAPLSASMI |
| | | KRYDEHHQDLTLLKALVRQQLPEKYKEIFFDQSKNGYAGYIDGGAS |
| | | QEEFYKFIKPILEKMDGTEELLVKLNREDLLRKQRTFDNGSIPHQIHL |
| | | GELHAILRRQEDFYPFLKDNREKIEKILTFRIPYYVGPLARGNSRFAW |
| | | MTRKSEETITPWNFEEVVDKGASAQSFIERMTNFDKNLPNEKVLPKH |
| | | SLLYEYFTVYNELTKVKYVTEGMRKPAFLSGEQKKAIVDLLFKTNR |
| | | KVTVKQLKEDYFKKIECFDSVEISGVEDRFNASLGTYHDLLKIIKDKD |
| | | FLDNEENEDILEDIVLTLTLFEDREMIEERLKTYAHLFDDKVMKQLK |
| | | RRRYTGWGRLSRKLINGIRDKQSGKTILDFLKSDGFANRNFMQLIHD |
| | | DSLTFKEDIQKAQVSGQGDSLHEHIANLAGSPAIKKGILQTVKVVDE |
| | | LVKVMGRHKPENIVIEMARENQTTQKGQKNSRERMKRIEEGIKELGS |
| | | QILKEHPVENTQLQNEKLYLYYLQNGRDMYVDQELDINRLSDYDVD |
| | | AIVPQSFLKDDSIDNKVLTRSDKNRGKSDNVPSEEVVKKMKNYWRQ |
| | | LLNAKLITQRKFDNLTKAERGGLSELDKAGFIKRQLVETRQITKHVA |
| | | QILDSRMNTKYDENDKLIREVKVITLKSKLVSDFRKDFQFYKVREIN |
| | | NYHHAHDAYLNAVVGTALIKKYPKLESEFVYGDYKVYDVRKMIAK |
| | | SEQEIGKATAKYFFYSNIMNFFKTEITLANGEIRKRPLIETNGETGEIV |
| | | WDKGRDFATVRKVLSMPQVNIVKKTEVQTGGFSKESILPKRNSDKLI |
| | | ARKKDWDPKKYGGFDSPTVAYSVLVVAKVEKGKSKKLKSVKELLG |
| | | ITIMERSSFEKNPIDFLEAKGYKEVKKDLIIKLPKYSLFELENGRKRML |
| | | ASAGELQKGNELALPSKYVNFLYLASHYEKLKGSPEDNEQKQLFVE |
| | | QHKHYLDEIIEQISEFSKRVILADANLDKVLSAYNKHRDKPIREQAEN |
| | | IIHLFTLTNLGAPAAFKYFDTTIDRKRYTSTKEVLDATLIHQSITGLYE |
| | | TRIDLSQLGGDPKKKRKVGGPSSGAPPPSGGSPAGSPTSTEEGTSESA |
| | | TPESGPGTSTEPSEGSAPGSPAGSPTSTEEGTSTEPSEGSAPGTSTEPSE |
| | | TGMERKRWECPALPQGWEREEVPRRSGLSAGHRDVFYYSPSGKKFR |
| | | SKPQLARYLGGSMDLSTFDFRTGKMLMSKMNKSRQRVRYDSSNQV |
| | | KGKPDLNTALPVRQTASIFKQPVTKITNHPSNKVKSDPQKAVDQPRQ |
| | | LFWEKKLSGLNAFDIAEELVKTMDLPKGLQGVGPGCTDETLLSAIAS |
| | | ALHTSTMPITGQLSAAVEKNPGVWLNTTQPLCKAFMVTDEDIRKQE |
| | | ELVQQVRKRLEEALMADMLAHVEELARDGEAPLDKACAEDDDEED |
| | | EEEEEEEPDPDPEMEHV |
| 1082 | Cas-MBD4 | MGTPKKKRKVMDKKYSIGLAIGTNSVGWAVITDEYKVPSKKFKVLG |
| | | NTDRHSIKKNLIGALLFDSGETAEATRLKRTARRRYTRRKNRICYLQ |
| | | EIFSNEMAKVDDSFFHRLEESFLVEEDKKHERHPIFGNIVDEVAYHEK |
| | | YPTIYHLRKKLVDSTDKADLRLIYLALAHMIKFRGHFLIEGDLNPDNS |
| | | DVDKLFIQLVQTYNQLFEENPINASGVDAKAILSARLSKSRRLENLIA |
| | | QLPGEKKNGLFGNLIALSLGLTPNFKSNFDLAEDAKLQLSKDTYDDD |
| | | LDNLLAQIGDQYADLFLAAKNLSDAILLSDILRVNTEITKAPLSASMI |
| | | KRYDEHHQDLTLLKALVRQQLPEKYKEIFFDQSKNGYAGYIDGGAS |
| | | QEEFYKFIKPILEKMDGTEELLVKLNREDLLRKQRTFDNGSIPHQIHL |
| | | GELHAILRRQEDFYPFLKDNREKIEKILTFRIPYYVGPLARGNSRFAW |
| | | MTRKSEETITPWNFEEVVDKGASAQSFIERMTNFDKNLPNEKVLPKH |
| | | SLLYEYFTVYNELTKVKYVTEGMRKPAFLSGEQKKAIVDLLFKTNR |
| | | KVTVKQLKEDYFKKIECFDSVEISGVEDRFNASLGTYHDLLKIIKDKD |
| | | FLDNEENEDILEDIVLTLTLFEDREMIEERLKTYAHLFDDKVMKQLK |
| | | RRRYTGWGRLSRKLINGIRDKQSGKTILDFLKSDGFANRNFMQLIHD |
| | | DSLTFKEDIQKAQVSGQGDSLHEHIANLAGSPAIKKGILQTVKVVDE |
| | | LVKVMGRHKPENIVIEMARENQTTQKGQKNSRERMKRIEEGIKELGS |
| | | QILKEHPVENTQLQNEKLYLYYLQNGRDMYVDQELDINRLSDYDVD |
| | | AIVPQSFLKDDSIDNKVLTRSDKNRGKSDNVPSEEVVKKMKNYWRQ |
| | | LLNAKLITQRKFDNLTKAERGGLSELDKAGFIKRQLVETRQITKHVA |
| | | QILDSRMNTKYDENDKLIREVKVITLKSKLVSDFRKDFQFYKVREIN |
| | | NYHHAHDAYLNAVVGTALIKKYPKLESEFVYGDYKVYDVRKMIAK |
| | | SEQEIGKATAKYFFYSNIMNFFKTEITLANGEIRKRPLIETNGETGEIV |
| | | WDKGRDFATVRKVLSMPQVNIVKKTEVQTGGFSKESILPKRNSDKLI |
| | | ARKKDWDPKKYGGFDSPTVAYSVLVVAKVEKGKSKKLKSVKELLG |
| | | ITIMERSSFEKNPIDFLEAKGYKEVKKDLIIKLPKYSLFELENGRKRML |
| | | ASAGELQKGNELALPSKYVNFLYLASHYEKLKGSPEDNEQKQLFVE |
| | | QHKHYLDEIIEQISEFSKRVILADANLDKVLSAYNKHRDKPIREQAEN |
| | | IIHLFTLTNLGAPAAFKYFDTTIDRKRYTSTKEVLDATLIHQSITGLYE |
| | | TRIDLSQLGGDPKKKRKVGGPSSGAPPPSGGSPAGSPTSTEEGTSESA |
| | | TPESGPGTSTEPSEGSAPGSPAGSPTSTEEGTSTEPSEGSAPGTSTEPSE |
| | | TGMGTTGLESLSLGDRGAAPTVTSSERLVPDPPNDLRKEDVAMELE |
| | | RVGEDEEQMMIKRSSECNPLLQEPIASAQFGATAGTECRKSVPCGWE |
| | | RVVKQRLFGKTAGRFDVYFISPQGLKFRSKSSLANYLHKNGETSLKP |
| | | EDFDFTVLSKRGIKSRYKDCSMAALTSHLQNQSNNSNWNLRTRSKC |
| | | KKDVFMPPSSSSELQESRGLSNFTSTHLLLKEDEGVDDVNFRKVRKP |
| | | KGKVTILKGIPIKKTKKGCRKSCSGFVQSDSKRESVCNKADAESEPV |
| | | AQKSQLDRTVCISDAGACGETLSVTSEENSLVKKKERSLSSGSNFCSE |
| | | QKTSGIINKFCSAKDSEHNEKYEDTFLESEEIGTKVEVVERKEHLHTD |
| | | ILKRGSEMDNNCSPTRKDFTGEKIFQEDTIPRTQIERRKTSLYFSSKYN |
| | | KEALSPPRRKAFKKWTPPRSPFNLVQETLFHDPWKLLIATIFLNRTSG |
| | | KMAIPVLWKFLEKYPSAEVARTADWRDVSELLKPLGLYDLRAKTIV |
| | | KFSDEYLTKQWKYPIELHGIGKYGNDSYRIFCVNEWKQVHPEDHKL |
| | | NKYHDWLWENHEKLSLS |
| 1083 | Cas- | MGTPKKKRKVMDKKYSIGLAIGTNSVGWAVITDEYKVPSKKFKVLG |
| | MeCP2 | NTDRHSIKKNLIGALLFDSGETAEATRLKRTARRRYTRRKNRICYLQ |
| | | EIFSNEMAKVDDSFFHRLEESFLVEEDKKHERHPIFGNIVDEVAYHEK |
| | | YPTIYHLRKKLVDSTDKADLRLIYLALAHMIKFRGHFLIEGDLNPDNS |
| | | DVDKLFIQLVQTYNQLFEENPINASGVDAKAILSARLSKSRRLENLIA |
| | | QLPGEKKNGLFGNLIALSLGLTPNFKSNFDLAEDAKLQLSKDTYDDD |
| | | LDNLLAQIGDQYADLFLAAKNLSDAILLSDILRVNTEITKAPLSASMI |
| | | KRYDEHHQDLTLLKALVRQQLPEKYKEIFFDQSKNGYAGYIDGGAS |
| | | QEEFYKFIKPILEKMDGTEELLVKLNREDLLRKQRTFDNGSIPHQIHL |
| | | GELHAILRRQEDFYPFLKDNREKIEKILTFRIPYYVGPLARGNSRFAW |
| | | MTRKSEETITPWNFEEVVDKGASAQSFIERMTNFDKNLPNEKVLPKH |
| | | SLLYEYFTVYNELTKVKYVTEGMRKPAFLSGEQKKAIVDLLFKTNR |
| | | KVTVKQLKEDYFKKIECFDSVEISGVEDRFNASLGTYHDLLKIIKDKD |
| | | FLDNEENEDILEDIVLTLTLFEDREMIEERLKTYAHLFDDKVMKQLK |
| | | RRRYTGWGRLSRKLINGIRDKQSGKTILDFLKSDGFANRNFMQLIHD |
| | | DSLTFKEDIQKAQVSGQGDSLHEHIANLAGSPAIKKGILQTVKVVDE |
| | | LVKVMGRHKPENIVIEMARENQTTQKGQKNSRERMKRIEEGIKELGS |
| | | QILKEHPVENTQLQNEKLYLYYLQNGRDMYVDQELDINRLSDYDVD |
| | | AIVPQSFLKDDSIDNKVLTRSDKNRGKSDNVPSEEVVKKMKNYWRQ |
| | | LLNAKLITQRKFDNLTKAERGGLSELDKAGFIKRQLVETRQITKHVA |
| | | QILDSRMNTKYDENDKLIREVKVITLKSKLVSDFRKDFQFYKVREIN |
| | | NYHHAHDAYLNAVVGTALIKKYPKLESEFVYGDYKVYDVRKMIAK |
| | | SEQEIGKATAKYFFYSNIMNFFKTEITLANGEIRKRPLIETNGETGEIV |
| | | WDKGRDFATVRKVLSMPQVNIVKKTEVQTGGFSKESILPKRNSDKLI |
| | | ARKKDWDPKKYGGFDSPTVAYSVLVVAKVEKGKSKKLKSVKELLG |
| | | ITIMERSSFEKNPIDFLEAKGYKEVKKDLIIKLPKYSLFELENGRKRML |
| | | ASAGELQKGNELALPSKYVNFLYLASHYEKLKGSPEDNEQKQLFVE |
| | | QHKHYLDEIIEQISEFSKRVILADANLDKVLSAYNKHRDKPIREQAEN |
| | | IIHLFTLTNLGAPAAFKYFDTTIDRKRYTSTKEVLDATLIHQSITGLYE |
| | | TRIDLSQLGGDPKKKRKVGGPSSGAPPPSGGSPAGSPTSTEEGTSESA |
| | | TPESGPGTSTEPSEGSAPGSPAGSPTSTEEGTSTEPSEGSAPGTSTEPSE |
| | | TGMVAGMLGLREEKSEDQDLQGLKDKPLKFKKVKKDKKEEKEGK |
| | | HEPVQPSAHHSAEPAEAGKAETSEGSGSAPAVPEASASPKQRRSIIRD |
| | | RGPMYDDPTLPEGWTRKLKQRKSGRSAGKYDVYLINPQGKAFRSK |
| | | VELIAYFEKVGDTSLDPNDFDFTVTGRGSPSRREQKPPKKPKSPKAPG |
| | | TGRGRGRPKGSGTTRPKAATSEGVQVKRVLEKSPGKLLVKMPFQTS |
| | | PGGKAEGGGATTSTQVMVIKRPGRKRKAEADPQAIPKKRGRKPGSV |
| | | VAAAAAEAKKKAVKESSIRSVQETVLPIKKRKTRETVSIEVKEVVKP |
| | | LLVSTLGEKSGKGLKTCKSPGRKSKESSPKGRSSSASSPPKKEHHHH |
| | | HHHSESPKAPVPLLPPLPPPPPEPESSEDPTSPPEPQDLSSSVCKEEKMP |
| | | RGGSLESDGCPKEPAKTQPAVATAATAAEKYKHRGEGERKDIVSSS |
| | | MPRPNREEPVDSRTPVTERVS |
| 1084 | Cas-Kap1 | MGTPKKKRKVMDKKYSIGLAIGTNSVGWAVITDEYKVPSKKFKVLG |
| | | NTDRHSIKKNLIGALLFDSGETAEATRLKRTARRRYTRRKNRICYLQ |
| | | EIFSNEMAKVDDSFFHRLEESFLVEEDKKHERHPIFGNIVDEVAYHEK |
| | | YPTIYHLRKKLVDSTDKADLRLIYLALAHMIKFRGHFLIEGDLNPDNS |
| | | DVDKLFIQLVQTYNQLFEENPINASGVDAKAILSARLSKSRRLENLIA |
| | | QLPGEKKNGLFGNLIALSLGLTPNFKSNFDLAEDAKLQLSKDTYDDD |
| | | LDNLLAQIGDQYADLFLAAKNLSDAILLSDILRVNTEITKAPLSASMI |
| | | KRYDEHHQDLTLLKALVRQQLPEKYKEIFFDQSKNGYAGYIDGGAS |
| | | QEEFYKFIKPILEKMDGTEELLVKLNREDLLRKQRTFDNGSIPHQIHL |
| | | GELHAILRRQEDFYPFLKDNREKIEKILTFRIPYYVGPLARGNSRFAW |
| | | MTRKSEETITPWNFEEVVDKGASAQSFIERMTNFDKNLPNEKVLPKH |
| | | SLLYEYFTVYNELTKVKYVTEGMRKPAFLSGEQKKAIVDLLFKTNR |
| | | KVTVKQLKEDYFKKIECFDSVEISGVEDRFNASLGTYHDLLKIIKDKD |
| | | FLDNEENEDILEDIVLTLTLFEDREMIEERLKTYAHLFDDKVMKQLK |
| | | RRRYTGWGRLSRKLINGIRDKQSGKTILDFLKSDGFANRNFMQLIHD |
| | | DSLTFKEDIQKAQVSGQGDSLHEHIANLAGSPAIKKGILQTVKVVDE |
| | | LVKVMGRHKPENIVIEMARENQTTQKGQKNSRERMKRIEEGIKELGS |
| | | QILKEHPVENTQLQNEKLYLYYLQNGRDMYVDQELDINRLSDYDVD |
| | | AIVPQSFLKDDSIDNKVLTRSDKNRGKSDNVPSEEVVKKMKNYWRQ |
| | | LLNAKLITQRKFDNLTKAERGGLSELDKAGFIKRQLVETRQITKHVA |
| | | QILDSRMNTKYDENDKLIREVKVITLKSKLVSDFRKDFQFYKVREIN |
| | | NYHHAHDAYLNAVVGTALIKKYPKLESEFVYGDYKVYDVRKMIAK |
| | | SEQEIGKATAKYFFYSNIMNFFKTEITLANGEIRKRPLIETNGETGEIV |
| | | WDKGRDFATVRKVLSMPQVNIVKKTEVQTGGFSKESILPKRNSDKLI |
| | | ARKKDWDPKKYGGFDSPTVAYSVLVVAKVEKGKSKKLKSVKELLG |
| | | ITIMERSSFEKNPIDFLEAKGYKEVKKDLIIKLPKYSLFELENGRKRML |
| | | ASAGELQKGNELALPSKYVNFLYLASHYEKLKGSPEDNEQKQLFVE |
| | | QHKHYLDEIIEQISEFSKRVILADANLDKVLSAYNKHRDKPIREQAEN |
| | | IIHLFTLTNLGAPAAFKYFDTTIDRKRYTSTKEVLDATLIHQSITGLYE |
| | | TRIDLSQLGGDPKKKRKVGGPSSGAPPPSGGSPAGSPTSTEEGTSESA |
| | | TPESGPGTSTEPSEGSAPGSPAGSPTSTEEGTSTEPSEGSAPGTSTEPSE |
| | | TGMAASAAAASAAAASAASGSPGPGEGSAGGEKRSTAPSAAASASA |
| | | SAAASSPAGGGAEALELLEHCGVCRERLRPEREPRLLPCLHSACSAC |
| | | LGPAAPAAANSSGDGGAAGDGTVVDCPVCKQQCFSKDIVENYFMR |
| | | DSGSKAATDAQDANQCCTSCEDNAPATSYCVECSEPLCETCVEAHQ |
| | | RVKYTKDHTVRSTGPAKSRDGERTVYCNVHKHEPLVLFCESCDTLT |
| | | CRDCQLNAHKDHQYQFLEDAVRNQRKLLASLVKRLGDKHATLQKS |
| | | TKEVRSSIRQVSDVQKRVQVDVKMAILQIMKELNKRGRVLVNDAQ |
| | | KVTEGQQERLERQHWTMTKIQKHQEHILRFASWALESDNNTALLLS |
| | | KKLIYFQLHRALKMIVDPVEPHGEMKFQWDLNAWTKSAEAFGKIVA |
| | | ERPGTNSTGPAPMAPPRAPGPLSKQGSGSSQPMEVQEGYGFGSGDDP |
| | | YSSAEPHVSGVKRSRSGEGEVSGLMRKVPRVSLERLDLDLTADSQPP |
| | | VFKVFPGSTTEDYNLIVIERGAAAAATGQPGTAPAGTPGAPPLAGMA |
| | | IVKEEETEAAIGAPPTATEGPETKPVLMALAEGPGAEGPRLASPSGST |
| | | SSGLEVVAPEGTSAPGGGPGTLDDSATICRVCQKPGDLVMCNQCEFC |
| | | FHLDCHLPALQDVPGEEWSCSLCHVLPDLKEEDGSLSLDGADSTGV |
| | | VAKLSPANQRKCERVLLALFCHEPCRPLHQLATDSTFSLDQPGGTLD |
| | | LTLIRARLQEKLSPPYSSPQEFAQDVGRMFKQFNKLTEDKADVQSIIG |
| | | LQRFFETRMNEAFGDTKFSAVLVEPPPMSLPGAGLSSQELSGGPGDG |
| | | P |
| 1085 | Cas-HP1a | MGTPKKKRKVMDKKYSIGLAIGTNSVGWAVITDEYKVPSKKFKVLG |
| | | NTDRHSIKKNLIGALLFDSGETAEATRLKRTARRRYTRRKNRICYLQ |
| | | EIFSNEMAKVDDSFFHRLEESFLVEEDKKHERHPIFGNIVDEVAYHEK |
| | | YPTIYHLRKKLVDSTDKADLRLIYLALAHMIKFRGHFLIEGDLNPDNS |
| | | DVDKLFIQLVQTYNQLFEENPINASGVDAKAILSARLSKSRRLENLIA |
| | | QLPGEKKNGLFGNLIALSLGLTPNFKSNFDLAEDAKLQLSKDTYDDD |
| | | LDNLLAQIGDQYADLFLAAKNLSDAILLSDILRVNTEITKAPLSASMI |
| | | KRYDEHHQDLTLLKALVRQQLPEKYKEIFFDQSKNGYAGYIDGGAS |
| | | QEEFYKFIKPILEKMDGTEELLVKLNREDLLRKQRTFDNGSIPHQIHL |
| | | GELHAILRRQEDFYPFLKDNREKIEKILTFRIPYYVGPLARGNSRFAW |
| | | MTRKSEETITPWNFEEVVDKGASAQSFIERMTNFDKNLPNEKVLPKH |
| | | SLLYEYFTVYNELTKVKYVTEGMRKPAFLSGEQKKAIVDLLFKTNR |
| | | KVTVKQLKEDYFKKIECFDSVEISGVEDRFNASLGTYHDLLKIIKDKD |
| | | FLDNEENEDILEDIVLTLTLFEDREMIEERLKTYAHLFDDKVMKQLK |
| | | RRRYTGWGRLSRKLINGIRDKQSGKTILDFLKSDGFANRNFMQLIHD |
| | | DSLTFKEDIQKAQVSGQGDSLHEHIANLAGSPAIKKGILQTVKVVDE |
| | | LVKVMGRHKPENIVIEMARENQTTQKGQKNSRERMKRIEEGIKELGS |
| | | QILKEHPVENTQLQNEKLYLYYLQNGRDMYVDQELDINRLSDYDVD |
| | | AIVPQSFLKDDSIDNKVLTRSDKNRGKSDNVPSEEVVKKMKNYWRQ |
| | | LLNAKLITQRKFDNLTKAERGGLSELDKAGFIKRQLVETRQITKHVA |
| | | QILDSRMNTKYDENDKLIREVKVITLKSKLVSDFRKDFQFYKVREIN |
| | | NYHHAHDAYLNAVVGTALIKKYPKLESEFVYGDYKVYDVRKMIAK |
| | | SEQEIGKATAKYFFYSNIMNFFKTEITLANGEIRKRPLIETNGETGEIV |
| | | WDKGRDFATVRKVLSMPQVNIVKKTEVQTGGFSKESILPKRNSDKLI |
| | | ARKKDWDPKKYGGFDSPTVAYSVLVVAKVEKGKSKKLKSVKELLG |
| | | ITIMERSSFEKNPIDFLEAKGYKEVKKDLIIKLPKYSLFELENGRKRML |
| | | ASAGELQKGNELALPSKYVNFLYLASHYEKLKGSPEDNEQKQLFVE |
| | | QHKHYLDEIIEQISEFSKRVILADANLDKVLSAYNKHRDKPIREQAEN |
| | | IIHLFTLTNLGAPAAFKYFDTTIDRKRYTSTKEVLDATLIHQSITGLYE |
| | | TRIDLSQLGGDPKKKRKVGGPSSGAPPPSGGSPAGSPTSTEEGTSESA |
| | | TPESGPGTSTEPSEGSAPGSPAGSPTSTEEGTSTEPSEGSAPGTSTEPSE |
| | | TGMGKKTKRTADSSSSEDEEEYVVEKVLDRRVVKGQVEYLLKWKG |
| | | FSEEHNTWEPEKNLDCPELISEFMKKYKKMKEGENNKPREKSESNK |
| | | RKSNFSNSADDIKSKKKREQSNDIARGFERGLEPEKIIGATDSCGDLM |
| | | FLMKWKGTDEADLVLAKEANVKCPQIVIAFYEERLTWHAYPEDAE |
| | | NKEKETAKS |
| 1086 | Cas-HP1b | MGTPKKKRKVMDKKYSIGLAIGTNSVGWAVITDEYKVPSKKFKVLG |
| | | NTDRHSIKKNLIGALLFDSGETAEATRLKRTARRRYTRRKNRICYLQ |
| | | EIFSNEMAKVDDSFFHRLEESFLVEEDKKHERHPIFGNIVDEVAYHEK |
| | | YPTIYHLRKKLVDSTDKADLRLIYLALAHMIKFRGHFLIEGDLNPDNS |
| | | DVDKLFIQLVQTYNQLFEENPINASGVDAKAILSARLSKSRRLENLIA |
| | | QLPGEKKNGLFGNLIALSLGLTPNFKSNFDLAEDAKLQLSKDTYDDD |
| | | LDNLLAQIGDQYADLFLAAKNLSDAILLSDILRVNTEITKAPLSASMI |
| | | KRYDEHHQDLTLLKALVRQQLPEKYKEIFFDQSKNGYAGYIDGGAS |
| | | QEEFYKFIKPILEKMDGTEELLVKLNREDLLRKQRTFDNGSIPHQIHL |
| | | GELHAILRRQEDFYPFLKDNREKIEKILTFRIPYYVGPLARGNSRFAW |
| | | MTRKSEETITPWNFEEVVDKGASAQSFIERMTNFDKNLPNEKVLPKH |
| | | SLLYEYFTVYNELTKVKYVTEGMRKPAFLSGEQKKAIVDLLFKTNR |
| | | KVTVKQLKEDYFKKIECFDSVEISGVEDRFNASLGTYHDLLKIIKDKD |
| | | FLDNEENEDILEDIVLTLTLFEDREMIEERLKTYAHLFDDKVMKQLK |
| | | RRRYTGWGRLSRKLINGIRDKQSGKTILDFLKSDGFANRNFMQLIHD |
| | | DSLTFKEDIQKAQVSGQGDSLHEHIANLAGSPAIKKGILQTVKVVDE |
| | | LVKVMGRHKPENIVIEMARENQTTQKGQKNSRERMKRIEEGIKELGS |
| | | QILKEHPVENTQLQNEKLYLYYLQNGRDMYVDQELDINRLSDYDVD |
| | | AIVPQSFLKDDSIDNKVLTRSDKNRGKSDNVPSEEVVKKMKNYWRQ |
| | | LLNAKLITQRKFDNLTKAERGGLSELDKAGFIKRQLVETRQITKHVA |
| | | QILDSRMNTKYDENDKLIREVKVITLKSKLVSDFRKDFQFYKVREIN |
| | | NYHHAHDAYLNAVVGTALIKKYPKLESEFVYGDYKVYDVRKMIAK |
| | | SEQEIGKATAKYFFYSNIMNFFKTEITLANGEIRKRPLIETNGETGEIV |
| | | WDKGRDFATVRKVLSMPQVNIVKKTEVQTGGFSKESILPKRNSDKLI |
| | | ARKKDWDPKKYGGFDSPTVAYSVLVVAKVEKGKSKKLKSVKELLG |
| | | ITIMERSSFEKNPIDFLEAKGYKEVKKDLIIKLPKYSLFELENGRKRML |
| | | ASAGELQKGNELALPSKYVNFLYLASHYEKLKGSPEDNEQKQLFVE |
| | | QHKHYLDEIIEQISEFSKRVILADANLDKVLSAYNKHRDKPIREQAEN |
| | | IIHLFTLTNLGAPAAFKYFDTTIDRKRYTSTKEVLDATLIHQSITGLYE |
| | | TRIDLSQLGGDPKKKRKVGGPSSGAPPPSGGSPAGSPTSTEEGTSESA |
| | | TPESGPGTSTEPSEGSAPGSPAGSPTSTEEGTSTEPSEGSAPGTSTEPSE |
| | | TGMGKKQNKKKVEEVLEEEEEEYVVEKVLDRRVVKGKVEYLLKW |
| | | KGFSDEDNTWEPEENLDCPDLIAEFLQSQKTAHETDKSEGGKRKADS |
| | | DSEDKGEESKPKKKKEESEKPRGFARGLEPERIIGATDSSGELMFLM |
| | | KWKNSDEADLVPAKEANVKCPQVVISFYEERLTWHSYPSEDDDKK |
| | | DDKN |
| 1087 | Cas-HP1g | MGTPKKKRKVMDKKYSIGLAIGTNSVGWAVITDEYKVPSKKFKVLG |
| | | NTDRHSIKKNLIGALLFDSGETAEATRLKRTARRRYTRRKNRICYLQ |
| | | EIFSNEMAKVDDSFFHRLEESFLVEEDKKHERHPIFGNIVDEVAYHEK |
| | | YPTIYHLRKKLVDSTDKADLRLIYLALAHMIKFRGHFLIEGDLNPDNS |
| | | DVDKLFIQLVQTYNQLFEENPINASGVDAKAILSARLSKSRRLENLIA |
| | | QLPGEKKNGLFGNLIALSLGLTPNFKSNFDLAEDAKLQLSKDTYDDD |
| | | LDNLLAQIGDQYADLFLAAKNLSDAILLSDILRVNTEITKAPLSASMI |
| | | KRYDEHHQDLTLLKALVRQQLPEKYKEIFFDQSKNGYAGYIDGGAS |
| | | QEEFYKFIKPILEKMDGTEELLVKLNREDLLRKQRTFDNGSIPHQIHL |
| | | GELHAILRRQEDFYPFLKDNREKIEKILTFRIPYYVGPLARGNSRFAW |
| | | MTRKSEETITPWNFEEVVDKGASAQSFIERMTNFDKNLPNEKVLPKH |
| | | SLLYEYFTVYNELTKVKYVTEGMRKPAFLSGEQKKAIVDLLFKTNR |
| | | KVTVKQLKEDYFKKIECFDSVEISGVEDRFNASLGTYHDLLKIIKDKD |
| | | FLDNEENEDILEDIVLTLTLFEDREMIEERLKTYAHLFDDKVMKQLK |
| | | RRRYTGWGRLSRKLINGIRDKQSGKTILDFLKSDGFANRNFMQLIHD |
| | | DSLTFKEDIQKAQVSGQGDSLHEHIANLAGSPAIKKGILQTVKVVDE |
| | | LVKVMGRHKPENIVIEMARENQTTQKGQKNSRERMKRIEEGIKELGS |
| | | QILKEHPVENTQLQNEKLYLYYLQNGRDMYVDQELDINRLSDYDVD |
| | | AIVPQSFLKDDSIDNKVLTRSDKNRGKSDNVPSEEVVKKMKNYWRQ |
| | | LLNAKLITQRKFDNLTKAERGGLSELDKAGFIKRQLVETRQITKHVA |
| | | QILDSRMNTKYDENDKLIREVKVITLKSKLVSDFRKDFQFYKVREIN |
| | | NYHHAHDAYLNAVVGTALIKKYPKLESEFVYGDYKVYDVRKMIAK |
| | | SEQEIGKATAKYFFYSNIMNFFKTEITLANGEIRKRPLIETNGETGEIV |
| | | WDKGRDFATVRKVLSMPQVNIVKKTEVQTGGFSKESILPKRNSDKLI |
| | | ARKKDWDPKKYGGFDSPTVAYSVLVVAKVEKGKSKKLKSVKELLG |
| | | ITIMERSSFEKNPIDFLEAKGYKEVKKDLIIKLPKYSLFELENGRKRML |
| | | ASAGELQKGNELALPSKYVNFLYLASHYEKLKGSPEDNEQKQLFVE |
| | | QHKHYLDEIIEQISEFSKRVILADANLDKVLSAYNKHRDKPIREQAEN |
| | | IIHLFTLTNLGAPAAFKYFDTTIDRKRYTSTKEVLDATLIHQSITGLYE |
| | | TRIDLSQLGGDPKKKRKVGGPSSGAPPPSGGSPAGSPTSTEEGTSESA |
| | | TPESGPGTSTEPSEGSAPGSPAGSPTSTEEGTSTEPSEGSAPGTSTEPSE |
| | | TGMASNKTTLQKMGKKQNGKSKKVEEAEPEEFVVEKVLDRRVVNG |
| | | KVEYFLKWKGFTDADNTWEPEENLDCPELIEAFLNSQKAGKEKDGT |
| | | KRKSLSDSESDDSKSKKKRDAADKPRGFARGLDPERIIGATDSSGEL |
| | | MFLMKWKDSDEADLVLAKEANMKCPQIVIAFYEERLTWHSCPEDE |
| | | AQ |
| 1088 | Cas- | MGTPKKKRKVMDKKYSIGLAIGTNSVGWAVITDEYKVPSKKFKVLG |
| | SetDB2 | NTDRHSIKKNLIGALLFDSGETAEATRLKRTARRRYTRRKNRICYLQ |
| | | EIFSNEMAKVDDSFFHRLEESFLVEEDKKHERHPIFGNIVDEVAYHEK |
| | | YPTIYHLRKKLVDSTDKADLRLIYLALAHMIKFRGHFLIEGDLNPDNS |
| | | DVDKLFIQLVQTYNQLFEENPINASGVDAKAILSARLSKSRRLENLIA |
| | | QLPGEKKNGLFGNLIALSLGLTPNFKSNFDLAEDAKLQLSKDTYDDD |
| | | LDNLLAQIGDQYADLFLAAKNLSDAILLSDILRVNTEITKAPLSASMI |
| | | KRYDEHHQDLTLLKALVRQQLPEKYKEIFFDQSKNGYAGYIDGGAS |
| | | QEEFYKFIKPILEKMDGTEELLVKLNREDLLRKQRTFDNGSIPHQIHL |
| | | GELHAILRRQEDFYPFLKDNREKIEKILTFRIPYYVGPLARGNSRFAW |
| | | MTRKSEETITPWNFEEVVDKGASAQSFIERMTNFDKNLPNEKVLPKH |
| | | SLLYEYFTVYNELTKVKYVTEGMRKPAFLSGEQKKAIVDLLFKTNR |
| | | KVTVKQLKEDYFKKIECFDSVEISGVEDRFNASLGTYHDLLKIIKDKD |
| | | FLDNEENEDILEDIVLTLTLFEDREMIEERLKTYAHLFDDKVMKQLK |
| | | RRRYTGWGRLSRKLINGIRDKQSGKTILDFLKSDGFANRNFMQLIHD |
| | | DSLTFKEDIQKAQVSGQGDSLHEHIANLAGSPAIKKGILQTVKVVDE |
| | | LVKVMGRHKPENIVIEMARENQTTQKGQKNSRERMKRIEEGIKELGS |
| | | QILKEHPVENTQLQNEKLYLYYLQNGRDMYVDQELDINRLSDYDVD |
| | | AIVPQSFLKDDSIDNKVLTRSDKNRGKSDNVPSEEVVKKMKNYWRQ |
| | | LLNAKLITQRKFDNLTKAERGGLSELDKAGFIKRQLVETRQITKHVA |
| | | QILDSRMNTKYDENDKLIREVKVITLKSKLVSDFRKDFQFYKVREIN |
| | | NYHHAHDAYLNAVVGTALIKKYPKLESEFVYGDYKVYDVRKMIAK |
| | | SEQEIGKATAKYFFYSNIMNFFKTEITLANGEIRKRPLIETNGETGEIV |
| | | WDKGRDFATVRKVLSMPQVNIVKKTEVQTGGFSKESILPKRNSDKLI |
| | | ARKKDWDPKKYGGFDSPTVAYSVLVVAKVEKGKSKKLKSVKELLG |
| | | ITIMERSSFEKNPIDFLEAKGYKEVKKDLIIKLPKYSLFELENGRKRML |
| | | ASAGELQKGNELALPSKYVNFLYLASHYEKLKGSPEDNEQKQLFVE |
| | | QHKHYLDEIIEQISEFSKRVILADANLDKVLSAYNKHRDKPIREQAEN |
| | | IIHLFTLTNLGAPAAFKYFDTTIDRKRYTSTKEVLDATLIHQSITGLYE |
| | | TRIDLSQLGGDPKKKRKVGGPSSGAPPPSGGSPAGSPTSTEEGTSESA |
| | | TPESGPGTSTEPSEGSAPGSPAGSPTSTEEGTSTEPSEGSAPGTSTEPSE |
| | | TGMGEKNGDAKTFWMELEDDGKVDFIFEQVQNVLQSLKQKIKDGS |
| | | ATNKEYIQAMILVNEATIINSSTSIKGASQKEVNAQSSDPMPVTQKEQ |
| | | ENKSNAFPSTSCENSFPEDCTFLTTENKEILSLEDKVVDFREKDSSSNL |
| | | SYQSHDCSGACLMKMPLNLKGENPLQLPIKCHFQRRHAKTNSHSSA |
| | | LHVSYKTPCGRSLRNVEEVFRYLLETECNFLFTDNFSFNTYVQLARN |
| | | YPKQKEVVSDVDISNGVESVPISFCNEIDSRKLPQFKYRKTVWPRAY |
| | | NLTNFSSMFTDSCDCSEGCIDITKCACLQLTARNAKTSPLSSDKITTG |
| | | YKYKRLQRQIPTGIYECSLLCKCNRQLCQNRVVQHGPQVRLQVFKT |
| | | EQKGWGVRCLDDIDRGTFVCIYSGRLLSRANTEKSYGIDENGRDENT |
| | | MKNIFSKKRKLEVACSDCEVEVLPLGLETHPRTAKTEKCPPKFSNNP |
| | | KELTVETKYDNISRIQYHSVIRDPESKTAIFQHNGKKMEFVSSESVTP |
| | | EDNDGFKPPREHLNSKTKGAQKDSSSNHVDEFEDNLLIESDVIDITKY |
| | | REETPPRSRCNQATTLDNQNIKKAIEVQIQKPQEGRSTACQRQQVFC |
| | | DEELLSETKNTSSDSLTKFNKGNVFLLDATKEGNVGRFLNHSCCPNL |
| | | LVQNVFVETHNRNFPLVAFFTNRYVKARTELTWDYGYEAGTVPEKE |
| | | IFCQCGVNKCRKKIL |
| 1089 | Cas- | MGTPKKKRKVMDKKYSIGLAIGTNSVGWAVITDEYKVPSKKFKVLG |
| | SUV39H1 | NTDRHSIKKNLIGALLFDSGETAEATRLKRTARRRYTRRKNRICYLQ |
| | | EIFSNEMAKVDDSFFHRLEESFLVEEDKKHERHPIFGNIVDEVAYHEK |
| | | YPTIYHLRKKLVDSTDKADLRLIYLALAHMIKFRGHFLIEGDLNPDNS |
| | | DVDKLFIQLVQTYNQLFEENPINASGVDAKAILSARLSKSRRLENLIA |
| | | QLPGEKKNGLFGNLIALSLGLTPNFKSNFDLAEDAKLQLSKDTYDDD |
| | | LDNLLAQIGDQYADLFLAAKNLSDAILLSDILRVNTEITKAPLSASMI |
| | | KRYDEHHQDLTLLKALVRQQLPEKYKEIFFDQSKNGYAGYIDGGAS |
| | | QEEFYKFIKPILEKMDGTEELLVKLNREDLLRKQRTFDNGSIPHQIHL |
| | | GELHAILRRQEDFYPFLKDNREKIEKILTFRIPYYVGPLARGNSRFAW |
| | | MTRKSEETITPWNFEEVVDKGASAQSFIERMTNFDKNLPNEKVLPKH |
| | | SLLYEYFTVYNELTKVKYVTEGMRKPAFLSGEQKKAIVDLLFKTNR |
| | | KVTVKQLKEDYFKKIECFDSVEISGVEDRFNASLGTYHDLLKIIKDKD |
| | | FLDNEENEDILEDIVLTLTLFEDREMIEERLKTYAHLFDDKVMKQLK |
| | | RRRYTGWGRLSRKLINGIRDKQSGKTILDFLKSDGFANRNFMQLIHD |
| | | DSLTFKEDIQKAQVSGQGDSLHEHIANLAGSPAIKKGILQTVKVVDE |
| | | LVKVMGRHKPENIVIEMARENQTTQKGQKNSRERMKRIEEGIKELGS |
| | | QILKEHPVENTQLQNEKLYLYYLQNGRDMYVDQELDINRLSDYDVD |
| | | AIVPQSFLKDDSIDNKVLTRSDKNRGKSDNVPSEEVVKKMKNYWRQ |
| | | LLNAKLITQRKFDNLTKAERGGLSELDKAGFIKRQLVETRQITKHVA |
| | | QILDSRMNTKYDENDKLIREVKVITLKSKLVSDFRKDFQFYKVREIN |
| | | NYHHAHDAYLNAVVGTALIKKYPKLESEFVYGDYKVYDVRKMIAK |
| | | SEQEIGKATAKYFFYSNIMNFFKTEITLANGEIRKRPLIETNGETGEIV |
| | | WDKGRDFATVRKVLSMPQVNIVKKTEVQTGGFSKESILPKRNSDKLI |
| | | ARKKDWDPKKYGGFDSPTVAYSVLVVAKVEKGKSKKLKSVKELLG |
| | | ITIMERSSFEKNPIDFLEAKGYKEVKKDLIIKLPKYSLFELENGRKRML |
| | | ASAGELQKGNELALPSKYVNFLYLASHYEKLKGSPEDNEQKQLFVE |
| | | QHKHYLDEIIEQISEFSKRVILADANLDKVLSAYNKHRDKPIREQAEN |
| | | IIHLFTLTNLGAPAAFKYFDTTIDRKRYTSTKEVLDATLIHQSITGLYE |
| | | TRIDLSQLGGDPKKKRKVGGPSSGAPPPSGGSPAGSPTSTEEGTSESA |
| | | TPESGPGTSTEPSEGSAPGSPAGSPTSTEEGTSTEPSEGSAPGTSTEPSE |
| | | TGMAENLKGCSVCCKSSWNQLQDLCRLAKLSCPALGISKRNLYDFE |
| | | VEYLCDYKKIREQEYYLVKWRGYPDSESTWEPRQNLKCVRILKQFH |
| | | KDLERELLRRHHRSKTPRHLDPSLANYLVQKAKQRRALRRWEQELN |
| | | AKRSHLGRITVENEVDLDGPPRAFVYINEYRVGEGITLNQVAVGCEC |
| | | QDCLWAPTGGCCPGASLHKFAYNDQGQVRLRAGLPIYECNSRCRCG |
| | | YDCPNRVVQKGIRYDLCIFRTDDGRGWGVRTLEKIRKNSFVMEYVG |
| | | EIITSEEAERRGQIYDRQGATYLFDLDYVEDVYTVDAAYYGNISHFV |
| | | NHSCDPNLQVYNVFIDNLDERLPRIAFFATRTIRAGEELTFDYNMQV |
| | | DPVDMESTRMDSNFGLAGLPGSPKKRVRIECKCGTESCRKYLF |
| 1090 | Cas- | MGTPKKKRKVMDKKYSIGLAIGTNSVGWAVITDEYKVPSKKFKVLG |
| | SUV39H1 | NTDRHSIKKNLIGALLFDSGETAEATRLKRTARRRYTRRKNRICYLQ |
| | [H320R] | EIFSNEMAKVDDSFFHRLEESFLVEEDKKHERHPIFGNIVDEVAYHEK |
| | | YPTIYHLRKKLVDSTDKADLRLIYLALAHMIKFRGHFLIEGDLNPDNS |
| | | DVDKLFIQLVQTYNQLFEENPINASGVDAKAILSARLSKSRRLENLIA |
| | | QLPGEKKNGLFGNLIALSLGLTPNFKSNFDLAEDAKLQLSKDTYDDD |
| | | LDNLLAQIGDQYADLFLAAKNLSDAILLSDILRVNTEITKAPLSASMI |
| | | KRYDEHHQDLTLLKALVRQQLPEKYKEIFFDQSKNGYAGYIDGGAS |
| | | QEEFYKFIKPILEKMDGTEELLVKLNREDLLRKQRTFDNGSIPHQIHL |
| | | GELHAILRRQEDFYPFLKDNREKIEKILTFRIPYYVGPLARGNSRFAW |
| | | MTRKSEETITPWNFEEVVDKGASAQSFIERMTNFDKNLPNEKVLPKH |
| | | SLLYEYFTVYNELTKVKYVTEGMRKPAFLSGEQKKAIVDLLFKTNR |
| | | KVTVKQLKEDYFKKIECFDSVEISGVEDRFNASLGTYHDLLKIIKDKD |
| | | FLDNEENEDILEDIVLTLTLFEDREMIEERLKTYAHLFDDKVMKQLK |
| | | RRRYTGWGRLSRKLINGIRDKQSGKTILDFLKSDGFANRNFMQLIHD |
| | | DSLTFKEDIQKAQVSGQGDSLHEHIANLAGSPAIKKGILQTVKVVDE |
| | | LVKVMGRHKPENIVIEMARENQTTQKGQKNSRERMKRIEEGIKELGS |
| | | QILKEHPVENTQLQNEKLYLYYLQNGRDMYVDQELDINRLSDYDVD |
| | | AIVPQSFLKDDSIDNKVLTRSDKNRGKSDNVPSEEVVKKMKNYWRQ |
| | | LLNAKLITQRKFDNLTKAERGGLSELDKAGFIKRQLVETRQITKHVA |
| | | QILDSRMNTKYDENDKLIREVKVITLKSKLVSDFRKDFQFYKVREIN |
| | | NYHHAHDAYLNAVVGTALIKKYPKLESEFVYGDYKVYDVRKMIAK |
| | | SEQEIGKATAKYFFYSNIMNFFKTEITLANGEIRKRPLIETNGETGEIV |
| | | WDKGRDFATVRKVLSMPQVNIVKKTEVQTGGFSKESILPKRNSDKLI |
| | | ARKKDWDPKKYGGFDSPTVAYSVLVVAKVEKGKSKKLKSVKELLG |
| | | ITIMERSSFEKNPIDFLEAKGYKEVKKDLIIKLPKYSLFELENGRKRML |
| | | ASAGELQKGNELALPSKYVNFLYLASHYEKLKGSPEDNEQKQLFVE |
| | | QHKHYLDEIIEQISEFSKRVILADANLDKVLSAYNKHRDKPIREQAEN |
| | | IIHLFTLTNLGAPAAFKYFDTTIDRKRYTSTKEVLDATLIHQSITGLYE |
| | | TRIDLSQLGGDPKKKRKVGGPSSGAPPPSGGSPAGSPTSTEEGTSESA |
| | | TPESGPGTSTEPSEGSAPGSPAGSPTSTEEGTSTEPSEGSAPGTSTEPSE |
| | | TGMAENLKGCSVCCKSSWNQLQDLCRLAKLSCPALGISKRNLYDFE |
| | | VEYLCDYKKIREQEYYLVKWRGYPDSESTWEPRQNLKCVRILKQFH |
| | | KDLERELLRRHHRSKTPRHLDPSLANYLVQKAKQRRALRRWEQELN |
| | | AKRSHLGRITVENEVDLDGPPRAFVYINEYRVGEGITLNQVAVGCEC |
| | | QDCLWAPTGGCCPGASLHKFAYNDQGQVRLRAGLPIYECNSRCRCG |
| | | YDCPNRVVQKGIRYDLCIFRTDDGRGWGVRTLEKIRKNSFVMEYVG |
| | | EIITSEEAERRGQIYDRQGATYLFDLDYVEDVYTVDAAYYGNISRFV |
| | | NHSCDPNLQVYNVFIDNLDERLPRIAFFATRTIRAGEELTFDYNMQV |
| | | DPVDMESTRMDSNFGLAGLPGSPKKRVRIECKCGTESCRKYLF |
| 1091 | Cas- | MGTPKKKRKVMDKKYSIGLAIGTNSVGWAVITDEYKVPSKKFKVLG |
| | SUV39H2 | NTDRHSIKKNLIGALLFDSGETAEATRLKRTARRRYTRRKNRICYLQ |
| | | EIFSNEMAKVDDSFFHRLEESFLVEEDKKHERHPIFGNIVDEVAYHEK |
| | | YPTIYHLRKKLVDSTDKADLRLIYLALAHMIKFRGHFLIEGDLNPDNS |
| | | DVDKLFIQLVQTYNQLFEENPINASGVDAKAILSARLSKSRRLENLIA |
| | | QLPGEKKNGLFGNLIALSLGLTPNFKSNFDLAEDAKLQLSKDTYDDD |
| | | LDNLLAQIGDQYADLFLAAKNLSDAILLSDILRVNTEITKAPLSASMI |
| | | KRYDEHHQDLTLLKALVRQQLPEKYKEIFFDQSKNGYAGYIDGGAS |
| | | QEEFYKFIKPILEKMDGTEELLVKLNREDLLRKQRTFDNGSIPHQIHL |
| | | GELHAILRRQEDFYPFLKDNREKIEKILTFRIPYYVGPLARGNSRFAW |
| | | MTRKSEETITPWNFEEVVDKGASAQSFIERMTNFDKNLPNEKVLPKH |
| | | SLLYEYFTVYNELTKVKYVTEGMRKPAFLSGEQKKAIVDLLFKTNR |
| | | KVTVKQLKEDYFKKIECFDSVEISGVEDRFNASLGTYHDLLKIIKDKD |
| | | FLDNEENEDILEDIVLTLTLFEDREMIEERLKTYAHLFDDKVMKQLK |
| | | RRRYTGWGRLSRKLINGIRDKQSGKTILDFLKSDGFANRNFMQLIHD |
| | | DSLTFKEDIQKAQVSGQGDSLHEHIANLAGSPAIKKGILQTVKVVDE |
| | | LVKVMGRHKPENIVIEMARENQTTQKGQKNSRERMKRIEEGIKELGS |
| | | QILKEHPVENTQLQNEKLYLYYLQNGRDMYVDQELDINRLSDYDVD |
| | | AIVPQSFLKDDSIDNKVLTRSDKNRGKSDNVPSEEVVKKMKNYWRQ |
| | | LLNAKLITQRKFDNLTKAERGGLSELDKAGFIKRQLVETRQITKHVA |
| | | QILDSRMNTKYDENDKLIREVKVITLKSKLVSDFRKDFQFYKVREIN |
| | | NYHHAHDAYLNAVVGTALIKKYPKLESEFVYGDYKVYDVRKMIAK |
| | | SEQEIGKATAKYFFYSNIMNFFKTEITLANGEIRKRPLIETNGETGEIV |
| | | WDKGRDFATVRKVLSMPQVNIVKKTEVQTGGFSKESILPKRNSDKLI |
| | | ARKKDWDPKKYGGFDSPTVAYSVLVVAKVEKGKSKKLKSVKELLG |
| | | ITIMERSSFEKNPIDFLEAKGYKEVKKDLIIKLPKYSLFELENGRKRML |
| | | ASAGELQKGNELALPSKYVNFLYLASHYEKLKGSPEDNEQKQLFVE |
| | | QHKHYLDEIIEQISEFSKRVILADANLDKVLSAYNKHRDKPIREQAEN |
| | | IIHLFTLTNLGAPAAFKYFDTTIDRKRYTSTKEVLDATLIHQSITGLYE |
| | | TRIDLSQLGGDPKKKRKVGGPSSGAPPPSGGSPAGSPTSTEEGTSESA |
| | | TPESGPGTSTEPSEGSAPGSPAGSPTSTEEGTSTEPSEGSAPGTSTEPSE |
| | | TGMAAVGAEARGAWCVPCLVSLDTLQELCRKEKLTCKSIGITKRNL |
| | | NNYEVEYLCDYKVVKDMEYYLVKWKGWPDSTNTWEPLQNLKCPL |
| | | LLQQFSNDKHNYLSQVKKGKAITPKDNNKTLKPAIAEYIVKKAKQRI |
| | | ALQRWQDELNRRKNHKGMIFVENTVDLEGPPSDFYYINEYKPAPGIS |
| | | LVNEATFGCSCTDCFFQKCCPAEAGVLLAYNKNQQIKIPPGTPIYECN |
| | | SRCQCGPDCPNRIVQKGTQYSLCIFRTSNGRGWGVKTLVKIKRMSFV |
| | | MEYVGEVITSEEAERRGQFYDNKGITYLFDLDYESDEFTVDAARYG |
| | | NVSHFVNHSCDPNLQVFNVFIDNLDTRLPRIALFSTRTINAGEELTFD |
| | | YQMKGSGDISSDSIDHSPAKKRVRTVCKCGAVTCRGYLN |
| 1092 | Cas- | MGTPKKKRKVMDKKYSIGLAIGTNSVGWAVITDEYKVPSKKFKVLG |
| | SUV420H1 | NTDRHSIKKNLIGALLFDSGETAEATRLKRTARRRYTRRKNRICYLQ |
| | | EIFSNEMAKVDDSFFHRLEESFLVEEDKKHERHPIFGNIVDEVAYHEK |
| | | YPTIYHLRKKLVDSTDKADLRLIYLALAHMIKFRGHFLIEGDLNPDNS |
| | | DVDKLFIQLVQTYNQLFEENPINASGVDAKAILSARLSKSRRLENLIA |
| | | QLPGEKKNGLFGNLIALSLGLTPNFKSNFDLAEDAKLQLSKDTYDDD |
| | | LDNLLAQIGDQYADLFLAAKNLSDAILLSDILRVNTEITKAPLSASMI |
| | | KRYDEHHQDLTLLKALVRQQLPEKYKEIFFDQSKNGYAGYIDGGAS |
| | | QEEFYKFIKPILEKMDGTEELLVKLNREDLLRKQRTFDNGSIPHQIHL |
| | | GELHAILRRQEDFYPFLKDNREKIEKILTFRIPYYVGPLARGNSRFAW |
| | | MTRKSEETITPWNFEEVVDKGASAQSFIERMTNFDKNLPNEKVLPKH |
| | | SLLYEYFTVYNELTKVKYVTEGMRKPAFLSGEQKKAIVDLLFKTNR |
| | | KVTVKQLKEDYFKKIECFDSVEISGVEDRFNASLGTYHDLLKIIKDKD |
| | | FLDNEENEDILEDIVLTLTLFEDREMIEERLKTYAHLFDDKVMKQLK |
| | | RRRYTGWGRLSRKLINGIRDKQSGKTILDFLKSDGFANRNFMQLIHD |
| | | DSLTFKEDIQKAQVSGQGDSLHEHIANLAGSPAIKKGILQTVKVVDE |
| | | LVKVMGRHKPENIVIEMARENQTTQKGQKNSRERMKRIEEGIKELGS |
| | | QILKEHPVENTQLQNEKLYLYYLQNGRDMYVDQELDINRLSDYDVD |
| | | AIVPQSFLKDDSIDNKVLTRSDKNRGKSDNVPSEEVVKKMKNYWRQ |
| | | LLNAKLITQRKFDNLTKAERGGLSELDKAGFIKRQLVETRQITKHVA |
| | | QILDSRMNTKYDENDKLIREVKVITLKSKLVSDFRKDFQFYKVREIN |
| | | NYHHAHDAYLNAVVGTALIKKYPKLESEFVYGDYKVYDVRKMIAK |
| | | SEQEIGKATAKYFFYSNIMNFFKTEITLANGEIRKRPLIETNGETGEIV |
| | | WDKGRDFATVRKVLSMPQVNIVKKTEVQTGGFSKESILPKRNSDKLI |
| | | ARKKDWDPKKYGGFDSPTVAYSVLVVAKVEKGKSKKLKSVKELLG |
| | | ITIMERSSFEKNPIDFLEAKGYKEVKKDLIIKLPKYSLFELENGRKRML |
| | | ASAGELQKGNELALPSKYVNFLYLASHYEKLKGSPEDNEQKQLFVE |
| | | QHKHYLDEIIEQISEFSKRVILADANLDKVLSAYNKHRDKPIREQAEN |
| | | IIHLFTLTNLGAPAAFKYFDTTIDRKRYTSTKEVLDATLIHQSITGLYE |
| | | TRIDLSQLGGDPKKKRKVGGPSSGAPPPSGGSPAGSPTSTEEGTSESA |
| | | TPESGPGTSTEPSEGSAPGSPAGSPTSTEEGTSTEPSEGSAPGTSTEPSE |
| | | TGMKWLGESKNMVVNGRRNGGKLSNDHQQNQSKLQHTGKDTLKA |
| | | GKNAVERRSNRCNGNSGFEGQSRYVPSSGMSAKELCENDDLATSLV |
| | | LDPYLGFQTHKMNTSAFPSRSSRHFSKSDSFSHNNPVRFRPIKGRQEE |
| | | LKEVIERFKKDEHLEKAFKCLTSGEWARHYFLNKNKMQEKLFKEHV |
| | | FIYLRMFATDSGFEILPCNRYSSEQNGAKIVATKEWKRNDKIELLVG |
| | | CIAELSEIEENMLLRHGENDFSVMYSTRKNCAQLWLGPAAFINHDCR |
| | | PNCKFVSTGRDTACVKALRDIEPGEEISCYYGDGFFGENNEFCECYT |
| | | CERRGTGAFKSRVGLPAPAPVINSKYGLRETDKRLNRLKKLGDSSKN |
| | | SDSQSVSSNTDADTTQEKNNATSNRKSSVGVKKNSKSRTLTRQSMS |
| | | RIPASSNSTSSKLTHINNSRVPKKLKKPAKPLLSKIKLRNHCKRLEQK |
| | | NASRKLEMGNLVLKEPKVVLYKNLPIKKDKEPEGPAQAAVASGCLT |
| | | RHAAREHRQNPVRGAHSQGESSPCTYITRRSVRTRTNLKEASDIKLE |
| | | PNTLNGYKSSVTEPCPDSGEQLQPAPVLQEEELAHETAQKGEAKCH |
| | | KSDTGMSKKKSRQGKLVKQFAKIEESTPVHDSPGKDDAVPDLMGPH |
| | | SDQGEHSGTVGVPVSYTDCAPSPVGCSVVTSDSFKTKDSFRTAKSKK |
| | | KRRITRYDAQLILENNSGIPKLTLRRRHDSSSKINDQENDGMNSSKIS |
| | | IKLSKDHDNDNNLYVAKLNNGFNSGSGSSSTKLKIQLKRDEENRGSY |
| | | TEGLHENGVCCSDPLSLLESRMEVDDYSQYEEESTDDSSSSEGDEEE |
| | | DDYDDDFEDDFIPLPPAKRLRLIVGKDSIDIDISSRRREDQSLRLNA |
| 1093 | Cas- | MGTPKKKRKVMDKKYSIGLAIGTNSVGWAVITDEYKVPSKKFKVLG |
| | SUV420H2 | NTDRHSIKKNLIGALLFDSGETAEATRLKRTARRRYTRRKNRICYLQ |
| | | EIFSNEMAKVDDSFFHRLEESFLVEEDKKHERHPIFGNIVDEVAYHEK |
| | | YPTIYHLRKKLVDSTDKADLRLIYLALAHMIKFRGHFLIEGDLNPDNS |
| | | DVDKLFIQLVQTYNQLFEENPINASGVDAKAILSARLSKSRRLENLIA |
| | | QLPGEKKNGLFGNLIALSLGLTPNFKSNFDLAEDAKLQLSKDTYDDD |
| | | LDNLLAQIGDQYADLFLAAKNLSDAILLSDILRVNTEITKAPLSASMI |
| | | KRYDEHHQDLTLLKALVRQQLPEKYKEIFFDQSKNGYAGYIDGGAS |
| | | QEEFYKFIKPILEKMDGTEELLVKLNREDLLRKQRTFDNGSIPHQIHL |
| | | GELHAILRRQEDFYPFLKDNREKIEKILTFRIPYYVGPLARGNSRFAW |
| | | MTRKSEETITPWNFEEVVDKGASAQSFIERMTNFDKNLPNEKVLPKH |
| | | SLLYEYFTVYNELTKVKYVTEGMRKPAFLSGEQKKAIVDLLFKTNR |
| | | KVTVKQLKEDYFKKIECFDSVEISGVEDRFNASLGTYHDLLKIIKDKD |
| | | FLDNEENEDILEDIVLTLTLFEDREMIEERLKTYAHLFDDKVMKQLK |
| | | RRRYTGWGRLSRKLINGIRDKQSGKTILDFLKSDGFANRNFMQLIHD |
| | | DSLTFKEDIQKAQVSGQGDSLHEHIANLAGSPAIKKGILQTVKVVDE |
| | | LVKVMGRHKPENIVIEMARENQTTQKGQKNSRERMKRIEEGIKELGS |
| | | QILKEHPVENTQLQNEKLYLYYLQNGRDMYVDQELDINRLSDYDVD |
| | | AIVPQSFLKDDSIDNKVLTRSDKNRGKSDNVPSEEVVKKMKNYWRQ |
| | | LLNAKLITQRKFDNLTKAERGGLSELDKAGFIKRQLVETRQITKHVA |
| | | QILDSRMNTKYDENDKLIREVKVITLKSKLVSDFRKDFQFYKVREIN |
| | | NYHHAHDAYLNAVVGTALIKKYPKLESEFVYGDYKVYDVRKMIAK |
| | | SEQEIGKATAKYFFYSNIMNFFKTEITLANGEIRKRPLIETNGETGEIV |
| | | WDKGRDFATVRKVLSMPQVNIVKKTEVQTGGFSKESILPKRNSDKLI |
| | | ARKKDWDPKKYGGFDSPTVAYSVLVVAKVEKGKSKKLKSVKELLG |
| | | ITIMERSSFEKNPIDFLEAKGYKEVKKDLIIKLPKYSLFELENGRKRML |
| | | ASAGELQKGNELALPSKYVNFLYLASHYEKLKGSPEDNEQKQLFVE |
| | | QHKHYLDEIIEQISEFSKRVILADANLDKVLSAYNKHRDKPIREQAEN |
| | | IIHLFTLTNLGAPAAFKYFDTTIDRKRYTSTKEVLDATLIHQSITGLYE |
| | | TRIDLSQLGGDPKKKRKVGGPSSGAPPPSGGSPAGSPTSTEEGTSESA |
| | | TPESGPGTSTEPSEGSAPGSPAGSPTSTEEGTSTEPSEGSAPGTSTEPSE |
| | | TGMGPDRVTARELCENDDLATSLVLDPYLGFRTHKMNVSPVPPLRR |
| | | QQHLRSALETFLRQRDLEAAYRALTLGGWTARYFQSRGPRQEAALK |
| | | THVYRYLRAFLPESGFTILPCTRYSMETNGAKIVSTRAWKKNEKLEL |
| | | LVGCIAELREADEGLLRAGENDFSIMYSTRKRSAQLWLGPAAFINHD |
| | | CKPNCKFVPADGNAACVKVLRDIEPGDEVTCFYGEGFFGEKNEHCE |
| | | CHTCERKGEGAFRTRPREPALPPRPLDKYQLRETKRRLQQGLDSGSR |
| | | QGLLGPRACVHPSPLRRDPFCAACQPLRLPACSARPDTSPLWLQWLP |
| | | QPQPRVRPRKRRRPRPRRAPVLSTHHAARVSLHRWGGCGPHCRLRG |
| | | EALVALGQPPHARWAPQQDWHWARRYGLPYVVRVDLRRLAPAPP |
| | | ATPAPAGTPGPILIPKQALAFAPFSPPKRLRLVVSHGSIDLDVGGEEL |
| 1094 | Cas-EZH1 | MGTPKKKRKVMDKKYSIGLAIGTNSVGWAVITDEYKVPSKKFKVLG |
| | | NTDRHSIKKNLIGALLFDSGETAEATRLKRTARRRYTRRKNRICYLQ |
| | | EIFSNEMAKVDDSFFHRLEESFLVEEDKKHERHPIFGNIVDEVAYHEK |
| | | YPTIYHLRKKLVDSTDKADLRLIYLALAHMIKFRGHFLIEGDLNPDNS |
| | | DVDKLFIQLVQTYNQLFEENPINASGVDAKAILSARLSKSRRLENLIA |
| | | QLPGEKKNGLFGNLIALSLGLTPNFKSNFDLAEDAKLQLSKDTYDDD |
| | | LDNLLAQIGDQYADLFLAAKNLSDAILLSDILRVNTEITKAPLSASMI |
| | | KRYDEHHQDLTLLKALVRQQLPEKYKEIFFDQSKNGYAGYIDGGAS |
| | | QEEFYKFIKPILEKMDGTEELLVKLNREDLLRKQRTFDNGSIPHQIHL |
| | | GELHAILRRQEDFYPFLKDNREKIEKILTFRIPYYVGPLARGNSRFAW |
| | | MTRKSEETITPWNFEEVVDKGASAQSFIERMTNFDKNLPNEKVLPKH |
| | | SLLYEYFTVYNELTKVKYVTEGMRKPAFLSGEQKKAIVDLLFKTNR |
| | | KVTVKQLKEDYFKKIECFDSVEISGVEDRFNASLGTYHDLLKIIKDKD |
| | | FLDNEENEDILEDIVLTLTLFEDREMIEERLKTYAHLFDDKVMKQLK |
| | | RRRYTGWGRLSRKLINGIRDKQSGKTILDFLKSDGFANRNFMQLIHD |
| | | DSLTFKEDIQKAQVSGQGDSLHEHIANLAGSPAIKKGILQTVKVVDE |
| | | LVKVMGRHKPENIVIEMARENQTTQKGQKNSRERMKRIEEGIKELGS |
| | | QILKEHPVENTQLQNEKLYLYYLQNGRDMYVDQELDINRLSDYDVD |
| | | AIVPQSFLKDDSIDNKVLTRSDKNRGKSDNVPSEEVVKKMKNYWRQ |
| | | LLNAKLITQRKFDNLTKAERGGLSELDKAGFIKRQLVETRQITKHVA |
| | | QILDSRMNTKYDENDKLIREVKVITLKSKLVSDFRKDFQFYKVREIN |
| | | NYHHAHDAYLNAVVGTALIKKYPKLESEFVYGDYKVYDVRKMIAK |
| | | SEQEIGKATAKYFFYSNIMNFFKTEITLANGEIRKRPLIETNGETGEIV |
| | | WDKGRDFATVRKVLSMPQVNIVKKTEVQTGGFSKESILPKRNSDKLI |
| | | ARKKDWDPKKYGGFDSPTVAYSVLVVAKVEKGKSKKLKSVKELLG |
| | | ITIMERSSFEKNPIDFLEAKGYKEVKKDLIIKLPKYSLFELENGRKRML |
| | | ASAGELQKGNELALPSKYVNFLYLASHYEKLKGSPEDNEQKQLFVE |
| | | QHKHYLDEIIEQISEFSKRVILADANLDKVLSAYNKHRDKPIREQAEN |
| | | IIHLFTLTNLGAPAAFKYFDTTIDRKRYTSTKEVLDATLIHQSITGLYE |
| | | TRIDLSQLGGDPKKKRKVGGPSSGAPPPSGGSPAGSPTSTEEGTSESA |
| | | TPESGPGTSTEPSEGSAPGSPAGSPTSTEEGTSTEPSEGSAPGTSTEPSE |
| | | TGMEIPNPPTSKCITYWKRKVKSEYMRLRQLKRLQANMGAKALYV |
| | | ANFAKVQEKTQILNEEWKKLRVQPVQSMKPVSGHPFLKKCTIESIFP |
| | | GFASQHMLMRSLNTVALVPIMYSWSPLQQNFMVEDETVLCNIPYMG |
| | | DEVKEEDETFIEELINNYDGKVHGEEEMIPGSVLISDAVFLELVDALN |
| | | QYSDEEEEGHNDTSDGKQDDSKEDLPVTRKRKRHAIEGNKKSSKKQ |
| | | FPNDMIFSAIASMFPENGVPDDMKERYRELTEMSDPNALPPQCTPNI |
| | | DGPNAKSVQREQSLHSFHTLFCRRCFKYDCFLHPFHATPNVYKRKN |
| | | KEIKIEPEPCGTDCFLLLEGAKEYAMLHNPRSKCSGRRRRRHHIVSAS |
| | | CSNASASAVAETKEGDSDRDTGNDWASSSSEANSRCQTPTKQKASP |
| | | APPQLCVVEAPSEPVEWTGAEESLFRVFHGTYFNNFCSIARLLGTKT |
| | | CKQVFQFAVKESLILKLPTDELMNPSQKKKRKHRLWAAHCRKIQLK |
| | | KDNSSTQVYNYQPCDHPDRPCDSTCPCIMTQNFCEKFCQCNPDCQN |
| | | RFPGCRCKTQCNTKQCPCYLAVRECDPDLCLTCGASEHWDCKVVSC |
| | | KNCSIQRGLKKHLLLAPSDVAGWGTFIKESVQKNEFISEYCGELISQD |
| | | EADRRGKVYDKYMSSFLFNLNNDFVVDATRKGNKIRFANHSVNPN |
| | | CYAKVVMVNGDHRIGIFAKRAIQAGEELFFDYRYSQADALKYVGIE |
| | | RETDVL |
| 1095 | Cas-EZH2 | MGTPKKKRKVMDKKYSIGLAIGTNSVGWAVITDEYKVPSKKFKVLG |
| | | NTDRHSIKKNLIGALLFDSGETAEATRLKRTARRRYTRRKNRICYLQ |
| | | EIFSNEMAKVDDSFFHRLEESFLVEEDKKHERHPIFGNIVDEVAYHEK |
| | | YPTIYHLRKKLVDSTDKADLRLIYLALAHMIKFRGHFLIEGDLNPDNS |
| | | DVDKLFIQLVQTYNQLFEENPINASGVDAKAILSARLSKSRRLENLIA |
| | | QLPGEKKNGLFGNLIALSLGLTPNFKSNFDLAEDAKLQLSKDTYDDD |
| | | LDNLLAQIGDQYADLFLAAKNLSDAILLSDILRVNTEITKAPLSASMI |
| | | KRYDEHHQDLTLLKALVRQQLPEKYKEIFFDQSKNGYAGYIDGGAS |
| | | QEEFYKFIKPILEKMDGTEELLVKLNREDLLRKQRTFDNGSIPHQIHL |
| | | GELHAILRRQEDFYPFLKDNREKIEKILTFRIPYYVGPLARGNSRFAW |
| | | MTRKSEETITPWNFEEVVDKGASAQSFIERMTNFDKNLPNEKVLPKH |
| | | SLLYEYFTVYNELTKVKYVTEGMRKPAFLSGEQKKAIVDLLFKTNR |
| | | KVTVKQLKEDYFKKIECFDSVEISGVEDRFNASLGTYHDLLKIIKDKD |
| | | FLDNEENEDILEDIVLTLTLFEDREMIEERLKTYAHLFDDKVMKQLK |
| | | RRRYTGWGRLSRKLINGIRDKQSGKTILDFLKSDGFANRNFMQLIHD |
| | | DSLTFKEDIQKAQVSGQGDSLHEHIANLAGSPAIKKGILQTVKVVDE |
| | | LVKVMGRHKPENIVIEMARENQTTQKGQKNSRERMKRIEEGIKELGS |
| | | QILKEHPVENTQLQNEKLYLYYLQNGRDMYVDQELDINRLSDYDVD |
| | | AIVPQSFLKDDSIDNKVLTRSDKNRGKSDNVPSEEVVKKMKNYWRQ |
| | | LLNAKLITQRKFDNLTKAERGGLSELDKAGFIKRQLVETRQITKHVA |
| | | QILDSRMNTKYDENDKLIREVKVITLKSKLVSDFRKDFQFYKVREIN |
| | | NYHHAHDAYLNAVVGTALIKKYPKLESEFVYGDYKVYDVRKMIAK |
| | | SEQEIGKATAKYFFYSNIMNFFKTEITLANGEIRKRPLIETNGETGEIV |
| | | WDKGRDFATVRKVLSMPQVNIVKKTEVQTGGFSKESILPKRNSDKLI |
| | | ARKKDWDPKKYGGFDSPTVAYSVLVVAKVEKGKSKKLKSVKELLG |
| | | ITIMERSSFEKNPIDFLEAKGYKEVKKDLIIKLPKYSLFELENGRKRML |
| | | ASAGELQKGNELALPSKYVNFLYLASHYEKLKGSPEDNEQKQLFVE |
| | | QHKHYLDEIIEQISEFSKRVILADANLDKVLSAYNKHRDKPIREQAEN |
| | | IIHLFTLTNLGAPAAFKYFDTTIDRKRYTSTKEVLDATLIHQSITGLYE |
| | | TRIDLSQLGGDPKKKRKVGGPSSGAPPPSGGSPAGSPTSTEEGTSESA |
| | | TPESGPGTSTEPSEGSAPGSPAGSPTSTEEGTSTEPSEGSAPGTSTEPSE |
| | | TGMGQTGKKSEKGPVCWRKRVKSEYMRLRQLKRFRRADEVKSMFS |
| | | SNRQKILERTEILNQEWKQRRIQPVHILTSVSSLRGTRECSVTSDLDFP |
| | | TQVIPLKTLNAVASVPIMYSWSPLQQNFMVEDETVLHNIPYMGDEV |
| | | LDQDGTFIEELIKNYDGKVHGDRECGFINDEIFVELVNALGQYNDDD |
| | | DDDDGDDPEEREEKQKDLEDHRDDKESRPPRKFPSDKIFEAISSMFP |
| | | DKGTAEELKEKYKELTEQQLPGALPPECTPNIDGPNAKSVQREQSLH |
| | | SFHTLFCRRCFKYDCFLHPFHATPNTYKRKNTETALDNKPCGPQCYQ |
| | | HLEGAKEFAAALTAERIKTPPKRPGGRRRGRLPNNSSRPSTPTINVLE |
| | | SKDTDSDREAGTETGGENNDKEEEEKKDETSSSSEANSRCQTPIKMK |
| | | PNIEPPENVEWSGAEASMFRVLIGTYYDNFCAIARLIGTKTCRQVYEF |
| | | RVKESSIIAPAPAEDVDTPPRKKKRKHRLWAAHCRKIQLKKDGSSNH |
| | | VYNYQPCDHPRQPCDSSCPCVIAQNFCEKFCQCSSECQNRFPGCRCK |
| | | AQCNTKQCPCYLAVRECDPDLCLTCGAADHWDSKNVSCKNCSIQR |
| | | GSKKHLLLAPSDVAGWGIFIKDPVQKNEFISEYCGEIISQDEADRRGK |
| | | VYDKYMCSFLFNLNNDFVVDATRKGNKIRFANHSVNPNCYAKVMM |
| | | VNGDHRIGIFAKRAIQTGEELFFDYRYSQADALKYVGIEREMEIP |
| 1096 | Cas- | MGTPKKKRKVMDKKYSIGLAIGTNSVGWAVITDEYKVPSKKFKVLG |
| | EZH2 | NTDRHSIKKNLIGALLFDSGETAEATRLKRTARRRYTRRKNRICYLQ |
| | [S21A] | EIFSNEMAKVDDSFFHRLEESFLVEEDKKHERHPIFGNIVDEVAYHEK |
| | | YPTIYHLRKKLVDSTDKADLRLIYLALAHMIKFRGHFLIEGDLNPDNS |
| | | DVDKLFIQLVQTYNQLFEENPINASGVDAKAILSARLSKSRRLENLIA |
| | | QLPGEKKNGLFGNLIALSLGLTPNFKSNFDLAEDAKLQLSKDTYDDD |
| | | LDNLLAQIGDQYADLFLAAKNLSDAILLSDILRVNTEITKAPLSASMI |
| | | KRYDEHHQDLTLLKALVRQQLPEKYKEIFFDQSKNGYAGYIDGGAS |
| | | QEEFYKFIKPILEKMDGTEELLVKLNREDLLRKQRTFDNGSIPHQIHL |
| | | GELHAILRRQEDFYPFLKDNREKIEKILTFRIPYYVGPLARGNSRFAW |
| | | MTRKSEETITPWNFEEVVDKGASAQSFIERMTNFDKNLPNEKVLPKH |
| | | SLLYEYFTVYNELTKVKYVTEGMRKPAFLSGEQKKAIVDLLFKTNR |
| | | KVTVKQLKEDYFKKIECFDSVEISGVEDRFNASLGTYHDLLKIIKDKD |
| | | FLDNEENEDILEDIVLTLTLFEDREMIEERLKTYAHLFDDKVMKQLK |
| | | RRRYTGWGRLSRKLINGIRDKQSGKTILDFLKSDGFANRNFMQLIHD |
| | | DSLTFKEDIQKAQVSGQGDSLHEHIANLAGSPAIKKGILQTVKVVDE |
| | | LVKVMGRHKPENIVIEMARENQTTQKGQKNSRERMKRIEEGIKELGS |
| | | QILKEHPVENTQLQNEKLYLYYLQNGRDMYVDQELDINRLSDYDVD |
| | | AIVPQSFLKDDSIDNKVLTRSDKNRGKSDNVPSEEVVKKMKNYWRQ |
| | | LLNAKLITQRKFDNLTKAERGGLSELDKAGFIKRQLVETRQITKHVA |
| | | QILDSRMNTKYDENDKLIREVKVITLKSKLVSDFRKDFQFYKVREIN |
| | | NYHHAHDAYLNAVVGTALIKKYPKLESEFVYGDYKVYDVRKMIAK |
| | | SEQEIGKATAKYFFYSNIMNFFKTEITLANGEIRKRPLIETNGETGEIV |
| | | WDKGRDFATVRKVLSMPQVNIVKKTEVQTGGFSKESILPKRNSDKLI |
| | | ARKKDWDPKKYGGFDSPTVAYSVLVVAKVEKGKSKKLKSVKELLG |
| | | ITIMERSSFEKNPIDFLEAKGYKEVKKDLIIKLPKYSLFELENGRKRML |
| | | ASAGELQKGNELALPSKYVNFLYLASHYEKLKGSPEDNEQKQLFVE |
| | | QHKHYLDEIIEQISEFSKRVILADANLDKVLSAYNKHRDKPIREQAEN |
| | | IIHLFTLTNLGAPAAFKYFDTTIDRKRYTSTKEVLDATLIHQSITGLYE |
| | | TRIDLSQLGGDPKKKRKVGGPSSGAPPPSGGSPAGSPTSTEEGTSESA |
| | | TPESGPGTSTEPSEGSAPGSPAGSPTSTEEGTSTEPSEGSAPGTSTEPSE |
| | | TGMGQTGKKSEKGPVCWRKRVKAEYMRLRQLKRFRRADEVKSMF |
| | | SSNRQKILERTEILNQEWKQRRIQPVHILTSVSSLRGTRECSVTSDLDF |
| | | PTQVIPLKTLNAVASVPIMYSWSPLQQNFMVEDETVLHNIPYMGDEV |
| | | LDQDGTFIEELIKNYDGKVHGDRECGFINDEIFVELVNALGQYNDDD |
| | | DDDDGDDPEEREEKQKDLEDHRDDKESRPPRKFPSDKIFEAISSMFP |
| | | DKGTAEELKEKYKELTEQQLPGALPPECTPNIDGPNAKSVQREQSLH |
| | | SFHTLFCRRCFKYDCFLHPFHATPNTYKRKNTETALDNKPCGPQCYQ |
| | | HLEGAKEFAAALTAERIKTPPKRPGGRRRGRLPNNSSRPSTPTINVLE |
| | | SKDTDSDREAGTETGGENNDKEEEEKKDETSSSSEANSRCQTPIKMK |
| | | PNIEPPENVEWSGAEASMFRVLIGTYYDNFCAIARLIGTKTCRQVYEF |
| | | RVKESSIIAPAPAEDVDTPPRKKKRKHRLWAAHCRKIQLKKDGSSNH |
| | | VYNYQPCDHPRQPCDSSCPCVIAQNFCEKFCQCSSECQNRFPGCRCK |
| | | AQCNTKQCPCYLAVRECDPDLCLTCGAADHWDSKNVSCKNCSIQR |
| | | GSKKHLLLAPSDVAGWGIFIKDPVQKNEFISEYCGEIISQDEADRRGK |
| | | VYDKYMCSFLFNLNNDFVVDATRKGNKIRFANHSVNPNCYAKVMM |
| | | VNGDHRIGIFAKRAIQTGEELFFDYRYSQADALKYVGIEREMEIP |
| 1097 | Cas- | MGTPKKKRKVMDKKYSIGLAIGTNSVGWAVITDEYKVPSKKFKVLG |
| | EHMT1 | NTDRHSIKKNLIGALLFDSGETAEATRLKRTARRRYTRRKNRICYLQ |
| | | EIFSNEMAKVDDSFFHRLEESFLVEEDKKHERHPIFGNIVDEVAYHEK |
| | | YPTIYHLRKKLVDSTDKADLRLIYLALAHMIKFRGHFLIEGDLNPDNS |
| | | DVDKLFIQLVQTYNQLFEENPINASGVDAKAILSARLSKSRRLENLIA |
| | | QLPGEKKNGLFGNLIALSLGLTPNFKSNFDLAEDAKLQLSKDTYDDD |
| | | LDNLLAQIGDQYADLFLAAKNLSDAILLSDILRVNTEITKAPLSASMI |
| | | KRYDEHHQDLTLLKALVRQQLPEKYKEIFFDQSKNGYAGYIDGGAS |
| | | QEEFYKFIKPILEKMDGTEELLVKLNREDLLRKQRTFDNGSIPHQIHL |
| | | GELHAILRRQEDFYPFLKDNREKIEKILTFRIPYYVGPLARGNSRFAW |
| | | MTRKSEETITPWNFEEVVDKGASAQSFIERMTNFDKNLPNEKVLPKH |
| | | SLLYEYFTVYNELTKVKYVTEGMRKPAFLSGEQKKAIVDLLFKTNR |
| | | KVTVKQLKEDYFKKIECFDSVEISGVEDRFNASLGTYHDLLKIIKDKD |
| | | FLDNEENEDILEDIVLTLTLFEDREMIEERLKTYAHLFDDKVMKQLK |
| | | RRRYTGWGRLSRKLINGIRDKQSGKTILDFLKSDGFANRNFMQLIHD |
| | | DSLTFKEDIQKAQVSGQGDSLHEHIANLAGSPAIKKGILQTVKVVDE |
| | | LVKVMGRHKPENIVIEMARENQTTQKGQKNSRERMKRIEEGIKELGS |
| | | QILKEHPVENTQLQNEKLYLYYLQNGRDMYVDQELDINRLSDYDVD |
| | | AIVPQSFLKDDSIDNKVLTRSDKNRGKSDNVPSEEVVKKMKNYWRQ |
| | | LLNAKLITQRKFDNLTKAERGGLSELDKAGFIKRQLVETRQITKHVA |
| | | QILDSRMNTKYDENDKLIREVKVITLKSKLVSDFRKDFQFYKVREIN |
| | | NYHHAHDAYLNAVVGTALIKKYPKLESEFVYGDYKVYDVRKMIAK |
| | | SEQEIGKATAKYFFYSNIMNFFKTEITLANGEIRKRPLIETNGETGEIV |
| | | WDKGRDFATVRKVLSMPQVNIVKKTEVQTGGFSKESILPKRNSDKLI |
| | | ARKKDWDPKKYGGFDSPTVAYSVLVVAKVEKGKSKKLKSVKELLG |
| | | ITIMERSSFEKNPIDFLEAKGYKEVKKDLIIKLPKYSLFELENGRKRML |
| | | ASAGELQKGNELALPSKYVNFLYLASHYEKLKGSPEDNEQKQLFVE |
| | | QHKHYLDEIIEQISEFSKRVILADANLDKVLSAYNKHRDKPIREQAEN |
| | | IIHLFTLTNLGAPAAFKYFDTTIDRKRYTSTKEVLDATLIHQSITGLYE |
| | | TRIDLSQLGGDPKKKRKVGGPSSGAPPPSGGSPAGSPTSTEEGTSESA |
| | | TPESGPGTSTEPSEGSAPGSPAGSPTSTEEGTSTEPSEGSAPGTSTEPSE |
| | | TGMAAADAEAVPARGEPQQDCCVKTELLGEETPMAADEGSAEKQA |
| | | GEAHMAADGETNGSCENSDASSHANAAKHTQDSARVNPQDGTNTL |
| | | TRIAENGVSERDSEAAKQNHVTADDFVQTSVIGSNGYILNKPALQAQ |
| | | PLRTTSTLASSLPGHAAKTLPGGAGKGRTPSAFPQTPAAPPATLGEGS |
| | | ADTEDRKLPAPGADVKVHRARKTMPKSVVGLHAASKDPREVREAR |
| | | DHKEPKEEINKNISDFGRQQLLPPFPSLHQSLPQNQCYMATTKSQTA |
| | | CLPFVLAAAVSRKKKRRMGTYSLVPKKKTKVLKQRTVIEMFKSITHS |
| | | TVGSKGEKDLGASSLHVNGESLEMDSDEDDSEELEEDDGHGAEQAA |
| | | AFPTEDSRTSKESMSEADRAQKMDGESEEEQESVDTGEEEEGGDESD |
| | | LSSESSIKKKFLKRKGKTDSPWIKPARKRRRRSRKKPSGALGSESYKS |
| | | SAGSAEQTAPGDSTGYMEVSLDSLDLRVKGILSSQAEGLANGPDVLE |
| | | TDGLQEVPLCSCRMETPKSREITTLANNQCMATESVDHELGRCTNSV |
| | | VKYELMRPSNKAPLLVLCEDHRGRMVKHQCCPGCGYFCTAGNFME |
| | | CQPESSISHRFHKDCASRVNNASYCPHCGEESSKAKEVTIAKADTTST |
| | | VTPVPGQEKGSALEGRADTTTGSAAGPPLSEDDKLQGAASHVPEGF |
| | | DPTGPAGLGRPTPGLSQGPGKETLESALIALDSEKPKKLRFHPKQLYF |
| | | SARQGELQKVLLMLVDGIDPNFKMEHQNKRSPLHAAAEAGHVDICH |
| | | MLVQAGANIDTCSEDQRTPLMEAAENNHLEAVKYLIKAGALVDPK |
| | | DAEGSTCLHLAAKKGHYEVVQYLLSNGQMDVNCQDDGGWTPMIW |
| | | ATEYKHVDLVKLLLSKGSDINIRDNEENICLHWAAFSGCVDIAEILLA |
| | | AKCDLHAVNIHGDSPLHIAARENRYDCVVLFLSRDSDVTLKNKEGE |
| | | TPLQCASLNSQVWSALQMSKALQDSAPDRPSPVERIVSRDIARGYER |
| | | IPIPCVNAVDSEPCPSNYKYVSQNCVTSPMNIDRNITHLQYCVCIDDC |
| | | SSSNCMCGQLSMRCWYDKDGRLLPEFNMAEPPLIFECNHACSCWRN |
| | | CRNRVVQNGLRARLQLYRTRDMGWGVRSLQDIPPGTFVCEYVGELI |
| | | SDSEADVREEDSYLFDLDNKDGEVYCIDARFYGNVSRFINHHCEPNL |
| | | VPVRVFMAHQDLRFPRIAFFSTRLIEAGEQLGFDYGERFWDIKGKLFS |
| | | CRCGSPKCRHSSAALAQRQASAAQEAQEDGLPDTSSAAAADPL |
| 1098 | Cas- | MGTPKKKRKVMDKKYSIGLAIGTNSVGWAVITDEYKVPSKKFKVLG |
| | EHMT2 | NTDRHSIKKNLIGALLFDSGETAEATRLKRTARRRYTRRKNRICYLQ |
| | | EIFSNEMAKVDDSFFHRLEESFLVEEDKKHERHPIFGNIVDEVAYHEK |
| | | YPTIYHLRKKLVDSTDKADLRLIYLALAHMIKFRGHFLIEGDLNPDNS |
| | | DVDKLFIQLVQTYNQLFEENPINASGVDAKAILSARLSKSRRLENLIA |
| | | QLPGEKKNGLFGNLIALSLGLTPNFKSNFDLAEDAKLQLSKDTYDDD |
| | | LDNLLAQIGDQYADLFLAAKNLSDAILLSDILRVNTEITKAPLSASMI |
| | | KRYDEHHQDLTLLKALVRQQLPEKYKEIFFDQSKNGYAGYIDGGAS |
| | | QEEFYKFIKPILEKMDGTEELLVKLNREDLLRKQRTFDNGSIPHQIHL |
| | | GELHAILRRQEDFYPFLKDNREKIEKILTFRIPYYVGPLARGNSRFAW |
| | | MTRKSEETITPWNFEEVVDKGASAQSFIERMTNFDKNLPNEKVLPKH |
| | | SLLYEYFTVYNELTKVKYVTEGMRKPAFLSGEQKKAIVDLLFKTNR |
| | | KVTVKQLKEDYFKKIECFDSVEISGVEDRFNASLGTYHDLLKIIKDKD |
| | | FLDNEENEDILEDIVLTLTLFEDREMIEERLKTYAHLFDDKVMKQLK |
| | | RRRYTGWGRLSRKLINGIRDKQSGKTILDFLKSDGFANRNFMQLIHD |
| | | DSLTFKEDIQKAQVSGQGDSLHEHIANLAGSPAIKKGILQTVKVVDE |
| | | LVKVMGRHKPENIVIEMARENQTTQKGQKNSRERMKRIEEGIKELGS |
| | | QILKEHPVENTQLQNEKLYLYYLQNGRDMYVDQELDINRLSDYDVD |
| | | AIVPQSFLKDDSIDNKVLTRSDKNRGKSDNVPSEEVVKKMKNYWRQ |
| | | LLNAKLITQRKFDNLTKAERGGLSELDKAGFIKRQLVETRQITKHVA |
| | | QILDSRMNTKYDENDKLIREVKVITLKSKLVSDFRKDFQFYKVREIN |
| | | NYHHAHDAYLNAVVGTALIKKYPKLESEFVYGDYKVYDVRKMIAK |
| | | SEQEIGKATAKYFFYSNIMNFFKTEITLANGEIRKRPLIETNGETGEIV |
| | | WDKGRDFATVRKVLSMPQVNIVKKTEVQTGGFSKESILPKRNSDKLI |
| | | ARKKDWDPKKYGGFDSPTVAYSVLVVAKVEKGKSKKLKSVKELLG |
| | | ITIMERSSFEKNPIDFLEAKGYKEVKKDLIIKLPKYSLFELENGRKRML |
| | | ASAGELQKGNELALPSKYVNFLYLASHYEKLKGSPEDNEQKQLFVE |
| | | QHKHYLDEIIEQISEFSKRVILADANLDKVLSAYNKHRDKPIREQAEN |
| | | IIHLFTLTNLGAPAAFKYFDTTIDRKRYTSTKEVLDATLIHQSITGLYE |
| | | TRIDLSQLGGDPKKKRKVGGPSSGAPPPSGGSPAGSPTSTEEGTSESA |
| | | TPESGPGTSTEPSEGSAPGSPAGSPTSTEEGTSTEPSEGSAPGTSTEPSE |
| | | TGMAAAAGAAAAAAAEGEAPAEMGALLLEKETRGATERVHGSLG |
| | | DTPRSEETLPKATPDSLEPAGPSSPASVTVTVGDEGADTPVGATPLIG |
| | | DESENLEGDGDLRGGRILLGHATKSFPSSPSKGGSCPSRAKMSMTGA |
| | | GKSPPSVQSLAMRLLSMPGAQGAAAAGSEPPPATTSPEGQPKVHRA |
| | | RKTMSKPGNGQPPVPEKRPPEIQHFRMSDDVHSLGKVTSDLAKRRK |
| | | LNSGGGLSEELGSARRSGEVTLTKGDPGSLEEWETVVGDDFSLYYDS |
| | | YSVDERVDSDSKSEVEALTEQLSEEEEEEEEEEEEEEEEEEEEEEEED |
| | | EESGNQSDRSGSSGRRKAKKKWRKDSPWVKPSRKRRKREPPRAKEP |
| | | RGVNGVGSSGPSEYMEVPLGSLELPSEGTLSPNHAGVSNDTSSLETE |
| | | RGFEELPLCSCRMEAPKIDRISERAGHKCMATESVDGELSGCNAAIL |
| | | KRETMRPSSRVALMVLCETHRARMVKHHCCPGCGYFCTAGTFLEC |
| | | HPDFRVAHRFHKACVSQLNGMVFCPHCGEDASEAQEVTIPRGDGVT |
| | | PPAGTAAPAPPPLSQDVPGRADTSQPSARMRGHGEPRRPPCDPLADT |
| | | IDSSGPSLTLPNGGCLSAVGLPLGPGREALEKALVIQESERRKKLRFH |
| | | PRQLYLSVKQGELQKVILMLLDNLDPNFQSDQQSKRTPLHAAAQKG |
| | | SVEICHVLLQAGANINAVDKQQRTPLMEAVVNNHLEVARYMVQRG |
| | | GCVYSKEEDGSTCLHHAAKIGNLEMVSLLLSTGQVDVNAQDSGGW |
| | | TPIIWAAEHKHIEVIRMLLTRGADVTLTDNEENICLHWASFTGSAAIA |
| | | EVLLNARCDLHAVNYHGDTPLHIAARESYHDCVLLFLSRGANPELR |
| | | NKEGDTAWDLTPERSDVWFALQLNRKLRLGVGNRAIRTEKIICRDV |
| | | ARGYENVPIPCVNGVDGEPCPEDYKYISENCETSTMNIDRNITHLQH |
| | | CTCVDDCSSSNCLCGQLSIRCWYDKDGRLLQEFNKIEPPLIFECNQAC |
| | | SCWRNCKNRVVQSGIKVRLQLYRTAKMGWGVRALQTIPQGTFICEY |
| | | VGELISDAEADVREDDSYLFDLDNKDGEVYCIDARYYGNISRFINHL |
| | | CDPNIIPVRVFMLHQDLRFPRIAFFSSRDIRTGEELGFDYGDRFWDIKS |
| | | KYFTCQCGSEKCKHSAEAIALEQSRLARLDPHPELLPELGSLPPVNT |
| 1099 | Cas-LSD1 | MGTPKKKRKVMDKKYSIGLAIGTNSVGWAVITDEYKVPSKKFKVLG |
| | | NTDRHSIKKNLIGALLFDSGETAEATRLKRTARRRYTRRKNRICYLQ |
| | | EIFSNEMAKVDDSFFHRLEESFLVEEDKKHERHPIFGNIVDEVAYHEK |
| | | YPTIYHLRKKLVDSTDKADLRLIYLALAHMIKFRGHFLIEGDLNPDNS |
| | | DVDKLFIQLVQTYNQLFEENPINASGVDAKAILSARLSKSRRLENLIA |
| | | QLPGEKKNGLFGNLIALSLGLTPNFKSNFDLAEDAKLQLSKDTYDDD |
| | | LDNLLAQIGDQYADLFLAAKNLSDAILLSDILRVNTEITKAPLSASMI |
| | | KRYDEHHQDLTLLKALVRQQLPEKYKEIFFDQSKNGYAGYIDGGAS |
| | | QEEFYKFIKPILEKMDGTEELLVKLNREDLLRKQRTFDNGSIPHQIHL |
| | | GELHAILRRQEDFYPFLKDNREKIEKILTFRIPYYVGPLARGNSRFAW |
| | | MTRKSEETITPWNFEEVVDKGASAQSFIERMTNFDKNLPNEKVLPKH |
| | | SLLYEYFTVYNELTKVKYVTEGMRKPAFLSGEQKKAIVDLLFKTNR |
| | | KVTVKQLKEDYFKKIECFDSVEISGVEDRFNASLGTYHDLLKIIKDKD |
| | | FLDNEENEDILEDIVLTLTLFEDREMIEERLKTYAHLFDDKVMKQLK |
| | | RRRYTGWGRLSRKLINGIRDKQSGKTILDFLKSDGFANRNFMQLIHD |
| | | DSLTFKEDIQKAQVSGQGDSLHEHIANLAGSPAIKKGILQTVKVVDE |
| | | LVKVMGRHKPENIVIEMARENQTTQKGQKNSRERMKRIEEGIKELGS |
| | | QILKEHPVENTQLQNEKLYLYYLQNGRDMYVDQELDINRLSDYDVD |
| | | AIVPQSFLKDDSIDNKVLTRSDKNRGKSDNVPSEEVVKKMKNYWRQ |
| | | LLNAKLITQRKFDNLTKAERGGLSELDKAGFIKRQLVETRQITKHVA |
| | | QILDSRMNTKYDENDKLIREVKVITLKSKLVSDFRKDFQFYKVREIN |
| | | NYHHAHDAYLNAVVGTALIKKYPKLESEFVYGDYKVYDVRKMIAK |
| | | SEQEIGKATAKYFFYSNIMNFFKTEITLANGEIRKRPLIETNGETGEIV |
| | | WDKGRDFATVRKVLSMPQVNIVKKTEVQTGGFSKESILPKRNSDKLI |
| | | ARKKDWDPKKYGGFDSPTVAYSVLVVAKVEKGKSKKLKSVKELLG |
| | | ITIMERSSFEKNPIDFLEAKGYKEVKKDLIIKLPKYSLFELENGRKRML |
| | | ASAGELQKGNELALPSKYVNFLYLASHYEKLKGSPEDNEQKQLFVE |
| | | QHKHYLDEIIEQISEFSKRVILADANLDKVLSAYNKHRDKPIREQAEN |
| | | IIHLFTLTNLGAPAAFKYFDTTIDRKRYTSTKEVLDATLIHQSITGLYE |
| | | TRIDLSQLGGDPKKKRKVGGPSSGAPPPSGGSPAGSPTSTEEGTSESA |
| | | TPESGPGTSTEPSEGSAPGSPAGSPTSTEEGTSTEPSEGSAPGTSTEPSE |
| | | TGMLSGKKAAAAAAAAAAAATGTEAGPGTAGGSENGSEVAAQPA |
| | | GLSGPAEVGPGAVGERTPRKKEPPRASPPGGLAEPPGSAGPQAGPTV |
| | | VPGSATPMETGIAETPEGRRTSRRKRAKVEYREMDESLANLSEDEYY |
| | | SEEERNAKAEKEKKLPPPPPQAPPEEENESEPEEPSGVEGAAFQSRLP |
| | | HDRMTSQEAACFPDIISGPQQTQKVFLFIRNRTLQLWLDNPKIQLTFE |
| | | ATLQQLEAPYNSDTVLVHRVHSYLERHGLINFGIYKRIKPLPTKKTG |
| | | KVIIIGSGVSGLAAARQLQSFGMDVTLLEARDRVGGRVATFRKGNY |
| | | VADLGAMVVTGLGGNPMAVVSKQVNMELAKIKQKCPLYEANGQA |
| | | VPKEKDEMVEQEFNRLLEATSYLSHQLDFNVLNNKPVSLGQALEVV |
| | | IQLQEKHVKDEQIEHWKKIVKTQEELKELLNKMVNLKEKIKELHQQ |
| | | YKEASEVKPPRDITAEFLVKSKHRDLTALCKEYDELAETQGKLEEKL |
| | | QELEANPPSDVYLSSRDRQILDWHFANLEFANATPLSTLSLKHWDQD |
| | | DDFEFTGSHLTVRNGYSCVPVALAEGLDIKLNTAVRQVRYTASGCE |
| | | VIAVNTRSTSQTFIYKCDAVLCTLPLGVLKQQPPAVQFVPPLPEWKTS |
| | | AVQRMGFGNLNKVVLCFDRVFWDPSVNLFGHVGSTTASRGELFLF |
| | | WNLYKAPILLALVAGEAAGIMENISDDVIVGRCLAILKGIFGSSAVPQ |
| | | PKETVVSRWRADPWARGSYSYVAAGSSGNDYDLMAQPITPGPSIPG |
| | | APQPIPRLFFAGEHTIRNYPATVHGALLSGLREAGRIADQFLGAMYTL |
| | | PRQATPGVPAQQSPSM |
| 1100 | Cas-SUZ12 | MGTPKKKRKVMDKKYSIGLAIGTNSVGWAVITDEYKVPSKKFKVLG |
| | | NTDRHSIKKNLIGALLFDSGETAEATRLKRTARRRYTRRKNRICYLQ |
| | | EIFSNEMAKVDDSFFHRLEESFLVEEDKKHERHPIFGNIVDEVAYHEK |
| | | YPTIYHLRKKLVDSTDKADLRLIYLALAHMIKFRGHFLIEGDLNPDNS |
| | | DVDKLFIQLVQTYNQLFEENPINASGVDAKAILSARLSKSRRLENLIA |
| | | QLPGEKKNGLFGNLIALSLGLTPNFKSNFDLAEDAKLQLSKDTYDDD |
| | | LDNLLAQIGDQYADLFLAAKNLSDAILLSDILRVNTEITKAPLSASMI |
| | | KRYDEHHQDLTLLKALVRQQLPEKYKEIFFDQSKNGYAGYIDGGAS |
| | | QEEFYKFIKPILEKMDGTEELLVKLNREDLLRKQRTFDNGSIPHQIHL |
| | | GELHAILRRQEDFYPFLKDNREKIEKILTFRIPYYVGPLARGNSRFAW |
| | | MTRKSEETITPWNFEEVVDKGASAQSFIERMTNFDKNLPNEKVLPKH |
| | | SLLYEYFTVYNELTKVKYVTEGMRKPAFLSGEQKKAIVDLLFKTNR |
| | | KVTVKQLKEDYFKKIECFDSVEISGVEDRFNASLGTYHDLLKIIKDKD |
| | | FLDNEENEDILEDIVLTLTLFEDREMIEERLKTYAHLFDDKVMKQLK |
| | | RRRYTGWGRLSRKLINGIRDKQSGKTILDFLKSDGFANRNFMQLIHD |
| | | DSLTFKEDIQKAQVSGQGDSLHEHIANLAGSPAIKKGILQTVKVVDE |
| | | LVKVMGRHKPENIVIEMARENQTTQKGQKNSRERMKRIEEGIKELGS |
| | | QILKEHPVENTQLQNEKLYLYYLQNGRDMYVDQELDINRLSDYDVD |
| | | AIVPQSFLKDDSIDNKVLTRSDKNRGKSDNVPSEEVVKKMKNYWRQ |
| | | LLNAKLITQRKFDNLTKAERGGLSELDKAGFIKRQLVETRQITKHVA |
| | | QILDSRMNTKYDENDKLIREVKVITLKSKLVSDFRKDFQFYKVREIN |
| | | NYHHAHDAYLNAVVGTALIKKYPKLESEFVYGDYKVYDVRKMIAK |
| | | SEQEIGKATAKYFFYSNIMNFFKTEITLANGEIRKRPLIETNGETGEIV |
| | | WDKGRDFATVRKVLSMPQVNIVKKTEVQTGGFSKESILPKRNSDKLI |
| | | ARKKDWDPKKYGGFDSPTVAYSVLVVAKVEKGKSKKLKSVKELLG |
| | | ITIMERSSFEKNPIDFLEAKGYKEVKKDLIIKLPKYSLFELENGRKRML |
| | | ASAGELQKGNELALPSKYVNFLYLASHYEKLKGSPEDNEQKQLFVE |
| | | QHKHYLDEIIEQISEFSKRVILADANLDKVLSAYNKHRDKPIREQAEN |
| | | IIHLFTLTNLGAPAAFKYFDTTIDRKRYTSTKEVLDATLIHQSITGLYE |
| | | TRIDLSQLGGDPKKKRKVGGPSSGAPPPSGGSPAGSPTSTEEGTSESA |
| | | TPESGPGTSTEPSEGSAPGSPAGSPTSTEEGTSTEPSEGSAPGTSTEPSE |
| | | TGMAPQKHGGGGGGGSGPSAGSGGGGFGGSAAVAAATASGGKSG |
| | | GGSCGGGGSYSASSSSSAAAAAGAAVLPVKKPKMEHVQADHELFL |
| | | QAFEKPTQIYRFLRTRNLIAPIFLHRTLTYMSHRNSRTNIKRKTFKVD |
| | | DMLSKVEKMKGEQESHSLSAHLQLTFTGFFHKNDKPSPNSENEQNS |
| | | VTLEVLLVKVCHKKRKDVSCPIRQVPTGKKQVPLNPDLNQTKPGNF |
| | | PSLAVSSNEFEPSNSHMVKSYSLLFRVTRPGRREFNGMINGETNENID |
| | | VNEELPARRKRNREDGEKTFVAQMTVFDKNRRLQLLDGEYEVAMQ |
| | | EMEECPISKKRATWETILDGKRLPPFETFSQGPTLQFTLRWTGETNDK |
| | | STAPIAKPLATRNSESLHQENKPGSVKPTQTIAVKESLTTDLQTRKEK |
| | | DTPNENRQKLRIFYQFLYNNNTRQQTEARDDLHCPWCTLNCRKLYS |
| | | LLKHLKLCHSRFIFNYVYHPKGARIDVSINECYDGSYAGNPQDIHRQ |
| | | PGFAFSRNGPVKRTPITHILVCRPKRTKASMSEFLESEDGEVEQQRTY |
| | | SSGHNRLYFHSDTCLPLRPQEMEVDSEDEKDPEWLREKTITQIEEFSD |
| | | VNEGEKEVMKLWNLHVMKHGFIADNQMNHACMLFVENYGQKIIK |
| | | KNLCRNFMLHLVSMHDFNLISIMSIDKAVTKLREMQQKLEKGESASP |
| | | ANEEITEEQNGTANGFSEINSKEKALETDSVSGVSKQSKKQKL |
| 1101 | Cas-EED | MGTPKKKRKVMDKKYSIGLAIGTNSVGWAVITDEYKVPSKKFKVLG |
| | | NTDRHSIKKNLIGALLFDSGETAEATRLKRTARRRYTRRKNRICYLQ |
| | | EIFSNEMAKVDDSFFHRLEESFLVEEDKKHERHPIFGNIVDEVAYHEK |
| | | YPTIYHLRKKLVDSTDKADLRLIYLALAHMIKFRGHFLIEGDLNPDNS |
| | | DVDKLFIQLVQTYNQLFEENPINASGVDAKAILSARLSKSRRLENLIA |
| | | QLPGEKKNGLFGNLIALSLGLTPNFKSNFDLAEDAKLQLSKDTYDDD |
| | | LDNLLAQIGDQYADLFLAAKNLSDAILLSDILRVNTEITKAPLSASMI |
| | | KRYDEHHQDLTLLKALVRQQLPEKYKEIFFDQSKNGYAGYIDGGAS |
| | | QEEFYKFIKPILEKMDGTEELLVKLNREDLLRKQRTFDNGSIPHQIHL |
| | | GELHAILRRQEDFYPFLKDNREKIEKILTFRIPYYVGPLARGNSRFAW |
| | | MTRKSEETITPWNFEEVVDKGASAQSFIERMTNFDKNLPNEKVLPKH |
| | | SLLYEYFTVYNELTKVKYVTEGMRKPAFLSGEQKKAIVDLLFKTNR |
| | | KVTVKQLKEDYFKKIECFDSVEISGVEDRFNASLGTYHDLLKIIKDKD |
| | | FLDNEENEDILEDIVLTLTLFEDREMIEERLKTYAHLFDDKVMKQLK |
| | | RRRYTGWGRLSRKLINGIRDKQSGKTILDFLKSDGFANRNFMQLIHD |
| | | DSLTFKEDIQKAQVSGQGDSLHEHIANLAGSPAIKKGILQTVKVVDE |
| | | LVKVMGRHKPENIVIEMARENQTTQKGQKNSRERMKRIEEGIKELGS |
| | | QILKEHPVENTQLQNEKLYLYYLQNGRDMYVDQELDINRLSDYDVD |
| | | AIVPQSFLKDDSIDNKVLTRSDKNRGKSDNVPSEEVVKKMKNYWRQ |
| | | LLNAKLITQRKFDNLTKAERGGLSELDKAGFIKRQLVETRQITKHVA |
| | | QILDSRMNTKYDENDKLIREVKVITLKSKLVSDFRKDFQFYKVREIN |
| | | NYHHAHDAYLNAVVGTALIKKYPKLESEFVYGDYKVYDVRKMIAK |
| | | SEQEIGKATAKYFFYSNIMNFFKTEITLANGEIRKRPLIETNGETGEIV |
| | | WDKGRDFATVRKVLSMPQVNIVKKTEVQTGGFSKESILPKRNSDKLI |
| | | ARKKDWDPKKYGGFDSPTVAYSVLVVAKVEKGKSKKLKSVKELLG |
| | | ITIMERSSFEKNPIDFLEAKGYKEVKKDLIIKLPKYSLFELENGRKRML |
| | | ASAGELQKGNELALPSKYVNFLYLASHYEKLKGSPEDNEQKQLFVE |
| | | QHKHYLDEIIEQISEFSKRVILADANLDKVLSAYNKHRDKPIREQAEN |
| | | IIHLFTLTNLGAPAAFKYFDTTIDRKRYTSTKEVLDATLIHQSITGLYE |
| | | TRIDLSQLGGDPKKKRKVGGPSSGAPPPSGGSPAGSPTSTEEGTSESA |
| | | TPESGPGTSTEPSEGSAPGSPAGSPTSTEEGTSTEPSEGSAPGTSTEPSE |
| | | TGMSEREVSTAPAGTDMPAAKKQKLSSDENSNPDLSGDENDDAVSI |
| | | ESGTNTERPDTPTNTPNAPGRKSWGKGKWKSKKCKYSFKCVNSLKE |
| | | DHNQPLFGVQFNWHSKEGDPLVFATVGSNRVTLYECHSQGEIRLLQ |
| | | SYVDADADENFYTCAWTYDSNTSHPLLAVAGSRGIIRIINPITMQCIK |
| | | HYVGHGNAINELKFHPRDPNLLLSVSKDHALRLWNIQTDTLVAIFGG |
| | | VEGHRDEVLSADYDLLGEKIMSCGMDHSLKLWRINSKRMMNAIKES |
| | | YDYNPNKTNRPFISQKIHFPDFSTRDIHRNYVDCVRWLGDLILSKSCE |
| | | NAIVCWKPGKMEDDIDKIKPSESNVTILGRFDYSQCDIWYMRFSMDF |
| | | WQKMLALGNQVGKLYVWDLEVEDPHKAKCTTLTHHKCGAAIRQT |
| | | SFSRDSSILIAVCDDASIWRWDRLR |
| 1102 | Cas- | MGTPKKKRKVMDKKYSIGLAIGTNSVGWAVITDEYKVPSKKFKVLG |
| | RING1 | NTDRHSIKKNLIGALLFDSGETAEATRLKRTARRRYTRRKNRICYLQ |
| | | EIFSNEMAKVDDSFFHRLEESFLVEEDKKHERHPIFGNIVDEVAYHEK |
| | | YPTIYHLRKKLVDSTDKADLRLIYLALAHMIKFRGHFLIEGDLNPDNS |
| | | DVDKLFIQLVQTYNQLFEENPINASGVDAKAILSARLSKSRRLENLIA |
| | | QLPGEKKNGLFGNLIALSLGLTPNFKSNFDLAEDAKLQLSKDTYDDD |
| | | LDNLLAQIGDQYADLFLAAKNLSDAILLSDILRVNTEITKAPLSASMI |
| | | KRYDEHHQDLTLLKALVRQQLPEKYKEIFFDQSKNGYAGYIDGGAS |
| | | QEEFYKFIKPILEKMDGTEELLVKLNREDLLRKQRTFDNGSIPHQIHL |
| | | GELHAILRRQEDFYPFLKDNREKIEKILTFRIPYYVGPLARGNSRFAW |
| | | MTRKSEETITPWNFEEVVDKGASAQSFIERMTNFDKNLPNEKVLPKH |
| | | SLLYEYFTVYNELTKVKYVTEGMRKPAFLSGEQKKAIVDLLFKTNR |
| | | KVTVKQLKEDYFKKIECFDSVEISGVEDRFNASLGTYHDLLKIIKDKD |
| | | FLDNEENEDILEDIVLTLTLFEDREMIEERLKTYAHLFDDKVMKQLK |
| | | RRRYTGWGRLSRKLINGIRDKQSGKTILDFLKSDGFANRNFMQLIHD |
| | | DSLTFKEDIQKAQVSGQGDSLHEHIANLAGSPAIKKGILQTVKVVDE |
| | | LVKVMGRHKPENIVIEMARENQTTQKGQKNSRERMKRIEEGIKELGS |
| | | QILKEHPVENTQLQNEKLYLYYLQNGRDMYVDQELDINRLSDYDVD |
| | | AIVPQSFLKDDSIDNKVLTRSDKNRGKSDNVPSEEVVKKMKNYWRQ |
| | | LLNAKLITQRKFDNLTKAERGGLSELDKAGFIKRQLVETRQITKHVA |
| | | QILDSRMNTKYDENDKLIREVKVITLKSKLVSDFRKDFQFYKVREIN |
| | | NYHHAHDAYLNAVVGTALIKKYPKLESEFVYGDYKVYDVRKMIAK |
| | | SEQEIGKATAKYFFYSNIMNFFKTEITLANGEIRKRPLIETNGETGEIV |
| | | WDKGRDFATVRKVLSMPQVNIVKKTEVQTGGFSKESILPKRNSDKLI |
| | | ARKKDWDPKKYGGFDSPTVAYSVLVVAKVEKGKSKKLKSVKELLG |
| | | ITIMERSSFEKNPIDFLEAKGYKEVKKDLIIKLPKYSLFELENGRKRML |
| | | ASAGELQKGNELALPSKYVNFLYLASHYEKLKGSPEDNEQKQLFVE |
| | | QHKHYLDEIIEQISEFSKRVILADANLDKVLSAYNKHRDKPIREQAEN |
| | | IIHLFTLTNLGAPAAFKYFDTTIDRKRYTSTKEVLDATLIHQSITGLYE |
| | | TRIDLSQLGGDPKKKRKVGGPSSGAPPPSGGSPAGSPTSTEEGTSESA |
| | | TPESGPGTSTEPSEGSAPGSPAGSPTSTEEGTSTEPSEGSAPGTSTEPSE |
| | | TGMTTPANAQNASKTWELSLYELHRTPQEAIMDGTEIAVSPRSLHSE |
| | | LMCPICLDMLKNTMTTKECLHRFCSDCIVTALRSGNKECPTCRKKLV |
| | | SKRSLRPDPNFDALISKIYPSREEYEAHQDRVLIRLSRLHNQQALSSSI |
| | | EEGLRMQAMHRAQRVRRPIPGSDQTTTMSGGEGEPGEGEGDGEDVS |
| | | SDSAPDSAPGPAPKRPRGGGAGGSSVGTGGGGTGGVGGGAGSEDSG |
| | | DRGGTLGGGTLGPPSPPGAPSPPEPGGEIELVFRPHPLLVEKGEYCQT |
| | | RYVKTTGNATVDHLSKYLALRIALERRQQQEAGEPGGPGGGASDTG |
| | | GPDGCGGEGGGAGGGDGPEEPALPSLEGVSEKQYTIYIAPGGGAFTT |
| | | LNGSLTLELVNEKFWKVSRPLELCYAPTKDPK |
| 1103 | Cas- | MGTPKKKRKVMDKKYSIGLAIGTNSVGWAVITDEYKVPSKKFKVLG |
| | RING2 | NTDRHSIKKNLIGALLFDSGETAEATRLKRTARRRYTRRKNRICYLQ |
| | | EIFSNEMAKVDDSFFHRLEESFLVEEDKKHERHPIFGNIVDEVAYHEK |
| | | YPTIYHLRKKLVDSTDKADLRLIYLALAHMIKFRGHFLIEGDLNPDNS |
| | | DVDKLFIQLVQTYNQLFEENPINASGVDAKAILSARLSKSRRLENLIA |
| | | QLPGEKKNGLFGNLIALSLGLTPNFKSNFDLAEDAKLQLSKDTYDDD |
| | | LDNLLAQIGDQYADLFLAAKNLSDAILLSDILRVNTEITKAPLSASMI |
| | | KRYDEHHQDLTLLKALVRQQLPEKYKEIFFDQSKNGYAGYIDGGAS |
| | | QEEFYKFIKPILEKMDGTEELLVKLNREDLLRKQRTFDNGSIPHQIHL |
| | | GELHAILRRQEDFYPFLKDNREKIEKILTFRIPYYVGPLARGNSRFAW |
| | | MTRKSEETITPWNFEEVVDKGASAQSFIERMTNFDKNLPNEKVLPKH |
| | | SLLYEYFTVYNELTKVKYVTEGMRKPAFLSGEQKKAIVDLLFKTNR |
| | | KVTVKQLKEDYFKKIECFDSVEISGVEDRFNASLGTYHDLLKIIKDKD |
| | | FLDNEENEDILEDIVLTLTLFEDREMIEERLKTYAHLFDDKVMKQLK |
| | | RRRYTGWGRLSRKLINGIRDKQSGKTILDFLKSDGFANRNFMQLIHD |
| | | DSLTFKEDIQKAQVSGQGDSLHEHIANLAGSPAIKKGILQTVKVVDE |
| | | LVKVMGRHKPENIVIEMARENQTTQKGQKNSRERMKRIEEGIKELGS |
| | | QILKEHPVENTQLQNEKLYLYYLQNGRDMYVDQELDINRLSDYDVD |
| | | AIVPQSFLKDDSIDNKVLTRSDKNRGKSDNVPSEEVVKKMKNYWRQ |
| | | LLNAKLITQRKFDNLTKAERGGLSELDKAGFIKRQLVETRQITKHVA |
| | | QILDSRMNTKYDENDKLIREVKVITLKSKLVSDFRKDFQFYKVREIN |
| | | NYHHAHDAYLNAVVGTALIKKYPKLESEFVYGDYKVYDVRKMIAK |
| | | SEQEIGKATAKYFFYSNIMNFFKTEITLANGEIRKRPLIETNGETGEIV |
| | | WDKGRDFATVRKVLSMPQVNIVKKTEVQTGGFSKESILPKRNSDKLI |
| | | ARKKDWDPKKYGGFDSPTVAYSVLVVAKVEKGKSKKLKSVKELLG |
| | | ITIMERSSFEKNPIDFLEAKGYKEVKKDLIIKLPKYSLFELENGRKRML |
| | | ASAGELQKGNELALPSKYVNFLYLASHYEKLKGSPEDNEQKQLFVE |
| | | QHKHYLDEIIEQISEFSKRVILADANLDKVLSAYNKHRDKPIREQAEN |
| | | IIHLFTLTNLGAPAAFKYFDTTIDRKRYTSTKEVLDATLIHQSITGLYE |
| | | TRIDLSQLGGDPKKKRKVGGPSSGAPPPSGGSPAGSPTSTEEGTSESA |
| | | TPESGPGTSTEPSEGSAPGSPAGSPTSTEEGTSTEPSEGSAPGTSTEPSE |
| | | TGMSQAVQTNGTQPLSKTWELSLYELQRTPQEAITDGLEIVVSPRSL |
| | | HSELMCPICLDMLKNTMTTKECLHRFCADCIITALRSGNKECPTCRK |
| | | KLVSKRSLRPDPNFDALISKIYPSRDEYEAHQERVLARINKHNNQQA |
| | | LSHSIEEGLKIQAMNRLQRGKKQQIENGSGAEDNGDSSHCSNASTHS |
| | | NQEAGPSNKRTKTSDDSGLELDNNNAAMAIDPVMDGASEIELVFRP |
| | | HPTLMEKDDSAQTRYIKTSGNATVDHLSKYLAVRLALEELRSKGES |
| | | NQMNLDTASEKQYTIYIATASGQFTVLNGSFSLELVSEKYWKVNKP |
| | | MELYYAPTKEHK |
| 1104 | Cas-PHC1 | MGTPKKKRKVMDKKYSIGLAIGTNSVGWAVITDEYKVPSKKFKVLG |
| | | NTDRHSIKKNLIGALLFDSGETAEATRLKRTARRRYTRRKNRICYLQ |
| | | EIFSNEMAKVDDSFFHRLEESFLVEEDKKHERHPIFGNIVDEVAYHEK |
| | | YPTIYHLRKKLVDSTDKADLRLIYLALAHMIKFRGHFLIEGDLNPDNS |
| | | DVDKLFIQLVQTYNQLFEENPINASGVDAKAILSARLSKSRRLENLIA |
| | | QLPGEKKNGLFGNLIALSLGLTPNFKSNFDLAEDAKLQLSKDTYDDD |
| | | LDNLLAQIGDQYADLFLAAKNLSDAILLSDILRVNTEITKAPLSASMI |
| | | KRYDEHHQDLTLLKALVRQQLPEKYKEIFFDQSKNGYAGYIDGGAS |
| | | QEEFYKFIKPILEKMDGTEELLVKLNREDLLRKQRTFDNGSIPHQIHL |
| | | GELHAILRRQEDFYPFLKDNREKIEKILTFRIPYYVGPLARGNSRFAW |
| | | MTRKSEETITPWNFEEVVDKGASAQSFIERMTNFDKNLPNEKVLPKH |
| | | SLLYEYFTVYNELTKVKYVTEGMRKPAFLSGEQKKAIVDLLFKTNR |
| | | KVTVKQLKEDYFKKIECFDSVEISGVEDRFNASLGTYHDLLKIIKDKD |
| | | FLDNEENEDILEDIVLTLTLFEDREMIEERLKTYAHLFDDKVMKQLK |
| | | RRRYTGWGRLSRKLINGIRDKQSGKTILDFLKSDGFANRNFMQLIHD |
| | | DSLTFKEDIQKAQVSGQGDSLHEHIANLAGSPAIKKGILQTVKVVDE |
| | | LVKVMGRHKPENIVIEMARENQTTQKGQKNSRERMKRIEEGIKELGS |
| | | QILKEHPVENTQLQNEKLYLYYLQNGRDMYVDQELDINRLSDYDVD |
| | | AIVPQSFLKDDSIDNKVLTRSDKNRGKSDNVPSEEVVKKMKNYWRQ |
| | | LLNAKLITQRKFDNLTKAERGGLSELDKAGFIKRQLVETRQITKHVA |
| | | QILDSRMNTKYDENDKLIREVKVITLKSKLVSDFRKDFQFYKVREIN |
| | | NYHHAHDAYLNAVVGTALIKKYPKLESEFVYGDYKVYDVRKMIAK |
| | | SEQEIGKATAKYFFYSNIMNFFKTEITLANGEIRKRPLIETNGETGEIV |
| | | WDKGRDFATVRKVLSMPQVNIVKKTEVQTGGFSKESILPKRNSDKLI |
| | | ARKKDWDPKKYGGFDSPTVAYSVLVVAKVEKGKSKKLKSVKELLG |
| | | ITIMERSSFEKNPIDFLEAKGYKEVKKDLIIKLPKYSLFELENGRKRML |
| | | ASAGELQKGNELALPSKYVNFLYLASHYEKLKGSPEDNEQKQLFVE |
| | | QHKHYLDEIIEQISEFSKRVILADANLDKVLSAYNKHRDKPIREQAEN |
| | | IIHLFTLTNLGAPAAFKYFDTTIDRKRYTSTKEVLDATLIHQSITGLYE |
| | | TRIDLSQLGGDPKKKRKVGGPSSGAPPPSGGSPAGSPTSTEEGTSESA |
| | | TPESGPGTSTEPSEGSAPGSPAGSPTSTEEGTSTEPSEGSAPGTSTEPSE |
| | | TGMETESEQNSNSTNGSSSSGGSSRPQIAQMSLYERQAVQALQALQR |
| | | QPNAAQYFHQFMLQQQLSNAQLHSLAAVQQATIAASRQASSPNTST |
| | | TQQQTTTTQASINLATTSAAQLISRSQSVSSPSATTLTQSVLLGNTTSP |
| | | PLNQSQAQMYLRPQLGNLLQVNRTLGRNVPLASQLILMPNGAVAAV |
| | | QQEVPSAQSPGVHADADQVQNLAVRNQQASAQGPQMQGSTQKAIP |
| | | PGASPVSSLSQASSQALAVAQASSGATNQSLNLSQAGGGSGNSIPGS |
| | | MGPGGGGQAHGGLGQLPSSGMGGGSCPRKGTGVVQPLPAAQTVTV |
| | | SQGSQTEAESAAAKKAEADGSGQQNVGMNLTRTATPAPSQTLISSA |
| | | TYTQIQPHSLIQQQQQIHLQQKQVVIQQQIAIHHQQQFQHRQSQLLHT |
| | | ATHLQLAQQQQQQQQQQQQQQQPQATTLTAPQPPQVPPTQQVPPSQ |
| | | SQQQAQTLVVQPMLQSSPLSLPPDAAPKPPIPIQSKPPVAPIKPPQLGA |
| | | AKMSAAQQPPPHIPVQVVGTRQPGTAQAQALGLAQLAAAVPTSRG |
| | | MPGTVQSGQAHLASSPPSSQAPGALQECPPTLAPGMTLAPVQGTAH |
| | | VVKGGATTSSPVVAQVPAAFYMQSVHLPGKPQTLAVKRKADSEEER |
| | | DDVSTLGSMLPAKASPVAESPKVMDEKSSLGEKAESVANVNANTPS |
| | | SELVALTPAPSVPPPTLAMVSRQMGDSKPPQAIVKPQILTHIIEGFVIQ |
| | | EGAEPFPVGCSQLLKESEKPLQTGLPTGLTENQSGGPLGVDSPSAELD |
| | | KKANLLKCEYCGKYAPAEQFRGSKRFCSMTCAKRYNVSCSHQFRLK |
| | | RKKMKEFQEANYARVRRRGPRRSSSDIARAKIQGKCHRGQEDSSRG |
| | | SDNSSYDEALSPTSPGPLSVRAGHGERDLGNPNTAPPTPELHGINPVF |
| | | LSSNPSRWSVEEVYEFIASLQGCQEIAEEFRSQEIDGQALLLLKEEHL |
| | | MSAMNIKLGPALKICAKINVLKET |
| 1105 | Cas-BMI1 | MGTPKKKRKVMDKKYSIGLAIGTNSVGWAVITDEYKVPSKKFKVLG |
| | | NTDRHSIKKNLIGALLFDSGETAEATRLKRTARRRYTRRKNRICYLQ |
| | | EIFSNEMAKVDDSFFHRLEESFLVEEDKKHERHPIFGNIVDEVAYHEK |
| | | YPTIYHLRKKLVDSTDKADLRLIYLALAHMIKFRGHFLIEGDLNPDNS |
| | | DVDKLFIQLVQTYNQLFEENPINASGVDAKAILSARLSKSRRLENLIA |
| | | QLPGEKKNGLFGNLIALSLGLTPNFKSNFDLAEDAKLQLSKDTYDDD |
| | | LDNLLAQIGDQYADLFLAAKNLSDAILLSDILRVNTEITKAPLSASMI |
| | | KRYDEHHQDLTLLKALVRQQLPEKYKEIFFDQSKNGYAGYIDGGAS |
| | | QEEFYKFIKPILEKMDGTEELLVKLNREDLLRKQRTFDNGSIPHQIHL |
| | | GELHAILRRQEDFYPFLKDNREKIEKILTFRIPYYVGPLARGNSRFAW |
| | | MTRKSEETITPWNFEEVVDKGASAQSFIERMTNFDKNLPNEKVLPKH |
| | | SLLYEYFTVYNELTKVKYVTEGMRKPAFLSGEQKKAIVDLLFKTNR |
| | | KVTVKQLKEDYFKKIECFDSVEISGVEDRFNASLGTYHDLLKIIKDKD |
| | | FLDNEENEDILEDIVLTLTLFEDREMIEERLKTYAHLFDDKVMKQLK |
| | | RRRYTGWGRLSRKLINGIRDKQSGKTILDFLKSDGFANRNFMQLIHD |
| | | DSLTFKEDIQKAQVSGQGDSLHEHIANLAGSPAIKKGILQTVKVVDE |
| | | LVKVMGRHKPENIVIEMARENQTTQKGQKNSRERMKRIEEGIKELGS |
| | | QILKEHPVENTQLQNEKLYLYYLQNGRDMYVDQELDINRLSDYDVD |
| | | AIVPQSFLKDDSIDNKVLTRSDKNRGKSDNVPSEEVVKKMKNYWRQ |
| | | LLNAKLITQRKFDNLTKAERGGLSELDKAGFIKRQLVETRQITKHVA |
| | | QILDSRMNTKYDENDKLIREVKVITLKSKLVSDFRKDFQFYKVREIN |
| | | NYHHAHDAYLNAVVGTALIKKYPKLESEFVYGDYKVYDVRKMIAK |
| | | SEQEIGKATAKYFFYSNIMNFFKTEITLANGEIRKRPLIETNGETGEIV |
| | | WDKGRDFATVRKVLSMPQVNIVKKTEVQTGGFSKESILPKRNSDKLI |
| | | ARKKDWDPKKYGGFDSPTVAYSVLVVAKVEKGKSKKLKSVKELLG |
| | | ITIMERSSFEKNPIDFLEAKGYKEVKKDLIIKLPKYSLFELENGRKRML |
| | | ASAGELQKGNELALPSKYVNFLYLASHYEKLKGSPEDNEQKQLFVE |
| | | QHKHYLDEIIEQISEFSKRVILADANLDKVLSAYNKHRDKPIREQAEN |
| | | IIHLFTLTNLGAPAAFKYFDTTIDRKRYTSTKEVLDATLIHQSITGLYE |
| | | TRIDLSQLGGDPKKKRKVGGPSSGAPPPSGGSPAGSPTSTEEGTSESA |
| | | TPESGPGTSTEPSEGSAPGSPAGSPTSTEEGTSTEPSEGSAPGTSTEPSE |
| | | TGMHRTTRIKITELNPHLMCVLCGGYFIDATTIIECLHSFCKTCIVRYL |
| | | ETSKYCPICDVQVHKTRPLLNIRSDKTLQDIVYKLVPGLFKNEMKRR |
| | | RDFYAAHPSADAANGSNEDRGEVADEDKRIITDDEIISLSIEFFDQNR |
| | | LDRKVNKDKEKSKEEVNDKRYLRCPAAMTVMHLRKFLRSKMDIPN |
| | | TFQIDVMYEEEPLKDYYTLMDIAYIYTWRRNGPLPLKYRVRPTCKR |
| | | MKISHQRDGLTNAGELESDSGSDKANSPAGGIPSTSSCLPSPSTPVQS |
| | | PHPQFPHISSTMNGTSNSPSGNHQSSFANRPRKSSVNGSSATSSG |
| 1106 | Cas- | MGTPKKKRKVMDKKYSIGLAIGTNSVGWAVITDEYKVPSKKFKVLG |
| | RBBP4 | NTDRHSIKKNLIGALLFDSGETAEATRLKRTARRRYTRRKNRICYLQ |
| | | EIFSNEMAKVDDSFFHRLEESFLVEEDKKHERHPIFGNIVDEVAYHEK |
| | | YPTIYHLRKKLVDSTDKADLRLIYLALAHMIKFRGHFLIEGDLNPDNS |
| | | DVDKLFIQLVQTYNQLFEENPINASGVDAKAILSARLSKSRRLENLIA |
| | | QLPGEKKNGLFGNLIALSLGLTPNFKSNFDLAEDAKLQLSKDTYDDD |
| | | LDNLLAQIGDQYADLFLAAKNLSDAILLSDILRVNTEITKAPLSASMI |
| | | KRYDEHHQDLTLLKALVRQQLPEKYKEIFFDQSKNGYAGYIDGGAS |
| | | QEEFYKFIKPILEKMDGTEELLVKLNREDLLRKQRTFDNGSIPHQIHL |
| | | GELHAILRRQEDFYPFLKDNREKIEKILTFRIPYYVGPLARGNSRFAW |
| | | MTRKSEETITPWNFEEVVDKGASAQSFIERMTNFDKNLPNEKVLPKH |
| | | SLLYEYFTVYNELTKVKYVTEGMRKPAFLSGEQKKAIVDLLFKTNR |
| | | KVTVKQLKEDYFKKIECFDSVEISGVEDRFNASLGTYHDLLKIIKDKD |
| | | FLDNEENEDILEDIVLTLTLFEDREMIEERLKTYAHLFDDKVMKQLK |
| | | RRRYTGWGRLSRKLINGIRDKQSGKTILDFLKSDGFANRNFMQLIHD |
| | | DSLTFKEDIQKAQVSGQGDSLHEHIANLAGSPAIKKGILQTVKVVDE |
| | | LVKVMGRHKPENIVIEMARENQTTQKGQKNSRERMKRIEEGIKELGS |
| | | QILKEHPVENTQLQNEKLYLYYLQNGRDMYVDQELDINRLSDYDVD |
| | | AIVPQSFLKDDSIDNKVLTRSDKNRGKSDNVPSEEVVKKMKNYWRQ |
| | | LLNAKLITQRKFDNLTKAERGGLSELDKAGFIKRQLVETRQITKHVA |
| | | QILDSRMNTKYDENDKLIREVKVITLKSKLVSDFRKDFQFYKVREIN |
| | | NYHHAHDAYLNAVVGTALIKKYPKLESEFVYGDYKVYDVRKMIAK |
| | | SEQEIGKATAKYFFYSNIMNFFKTEITLANGEIRKRPLIETNGETGEIV |
| | | WDKGRDFATVRKVLSMPQVNIVKKTEVQTGGFSKESILPKRNSDKLI |
| | | ARKKDWDPKKYGGFDSPTVAYSVLVVAKVEKGKSKKLKSVKELLG |
| | | ITIMERSSFEKNPIDFLEAKGYKEVKKDLIIKLPKYSLFELENGRKRML |
| | | ASAGELQKGNELALPSKYVNFLYLASHYEKLKGSPEDNEQKQLFVE |
| | | QHKHYLDEIIEQISEFSKRVILADANLDKVLSAYNKHRDKPIREQAEN |
| | | IIHLFTLTNLGAPAAFKYFDTTIDRKRYTSTKEVLDATLIHQSITGLYE |
| | | TRIDLSQLGGDPKKKRKVGGPSSGAPPPSGGSPAGSPTSTEEGTSESA |
| | | TPESGPGTSTEPSEGSAPGSPAGSPTSTEEGTSTEPSEGSAPGTSTEPSE |
| | | TGMADKEAAFDDAVEERVINEEYKIWKKNTPFLYDLVMTHALEWP |
| | | SLTAQWLPDVTRPEGKDFSIHRLVLGTHTSDEQNHLVIASVQLPNDD |
| | | AQFDASHYDSEKGEFGGFGSVSGKIEIEIKINHEGEVNRARYMPQNP |
| | | CIIATKTPSSDVLVFDYTKHPSKPDPSGECNPDLRLRGHQKEGYGLS |
| | | WNPNLSGHLLSASDDHTICLWDISAVPKEGKVVDAKTIFTGHTAVVE |
| | | DVSWHLLHESLFGSVADDQKLMIWDTRSNNTSKPSHSVDAHTAEVN |
| | | CLSFNPYSEFILATGSADKTVALWDLRNLKLKLHSFESHKDEIFQVQ |
| | | WSPHNETILASSGTDRRLNVWDLSKIGEEQSPEDAEDGPPELLFIHGG |
| | | HTAKISDFSWNPNEPWVICSVSEDNIMQVWQMAENIYNDEDPEGSV |
| | | DPEGQGS |
| 1107 | Cas- | MGTPKKKRKVMDKKYSIGLAIGTNSVGWAVITDEYKVPSKKFKVLG |
| | RBBP7 | NTDRHSIKKNLIGALLFDSGETAEATRLKRTARRRYTRRKNRICYLQ |
| | | EIFSNEMAKVDDSFFHRLEESFLVEEDKKHERHPIFGNIVDEVAYHEK |
| | | YPTIYHLRKKLVDSTDKADLRLIYLALAHMIKFRGHFLIEGDLNPDNS |
| | | DVDKLFIQLVQTYNQLFEENPINASGVDAKAILSARLSKSRRLENLIA |
| | | QLPGEKKNGLFGNLIALSLGLTPNFKSNFDLAEDAKLQLSKDTYDDD |
| | | LDNLLAQIGDQYADLFLAAKNLSDAILLSDILRVNTEITKAPLSASMI |
| | | KRYDEHHQDLTLLKALVRQQLPEKYKEIFFDQSKNGYAGYIDGGAS |
| | | QEEFYKFIKPILEKMDGTEELLVKLNREDLLRKQRTFDNGSIPHQIHL |
| | | GELHAILRRQEDFYPFLKDNREKIEKILTFRIPYYVGPLARGNSRFAW |
| | | MTRKSEETITPWNFEEVVDKGASAQSFIERMTNFDKNLPNEKVLPKH |
| | | SLLYEYFTVYNELTKVKYVTEGMRKPAFLSGEQKKAIVDLLFKTNR |
| | | KVTVKQLKEDYFKKIECFDSVEISGVEDRFNASLGTYHDLLKIIKDKD |
| | | FLDNEENEDILEDIVLTLTLFEDREMIEERLKTYAHLFDDKVMKQLK |
| | | RRRYTGWGRLSRKLINGIRDKQSGKTILDFLKSDGFANRNFMQLIHD |
| | | DSLTFKEDIQKAQVSGQGDSLHEHIANLAGSPAIKKGILQTVKVVDE |
| | | LVKVMGRHKPENIVIEMARENQTTQKGQKNSRERMKRIEEGIKELGS |
| | | QILKEHPVENTQLQNEKLYLYYLQNGRDMYVDQELDINRLSDYDVD |
| | | AIVPQSFLKDDSIDNKVLTRSDKNRGKSDNVPSEEVVKKMKNYWRQ |
| | | LLNAKLITQRKFDNLTKAERGGLSELDKAGFIKRQLVETRQITKHVA |
| | | QILDSRMNTKYDENDKLIREVKVITLKSKLVSDFRKDFQFYKVREIN |
| | | NYHHAHDAYLNAVVGTALIKKYPKLESEFVYGDYKVYDVRKMIAK |
| | | SEQEIGKATAKYFFYSNIMNFFKTEITLANGEIRKRPLIETNGETGEIV |
| | | WDKGRDFATVRKVLSMPQVNIVKKTEVQTGGFSKESILPKRNSDKLI |
| | | ARKKDWDPKKYGGFDSPTVAYSVLVVAKVEKGKSKKLKSVKELLG |
| | | ITIMERSSFEKNPIDFLEAKGYKEVKKDLIIKLPKYSLFELENGRKRML |
| | | ASAGELQKGNELALPSKYVNFLYLASHYEKLKGSPEDNEQKQLFVE |
| | | QHKHYLDEIIEQISEFSKRVILADANLDKVLSAYNKHRDKPIREQAEN |
| | | IIHLFTLTNLGAPAAFKYFDTTIDRKRYTSTKEVLDATLIHQSITGLYE |
| | | TRIDLSQLGGDPKKKRKVGGPSSGAPPPSGGSPAGSPTSTEEGTSESA |
| | | TPESGPGTSTEPSEGSAPGSPAGSPTSTEEGTSTEPSEGSAPGTSTEPSE |
| | | TGMASKEMFEDTVEERVINEEYKIWKKNTPFLYDLVMTHALQWPSL |
| | | TVQWLPEVTKPEGKDYALHWLVLGTHTSDEQNHLVVARVHIPNDD |
| | | AQFDASHCDSDKGEFGGFGSVTGKIECEIKINHEGEVNRARYMPQNP |
| | | HIIATKTPSSDVLVFDYTKHPAKPDPSGECNPDLRLRGHQKEGYGLS |
| | | WNSNLSGHLLSASDDHTVCLWDINAGPKEGKIVDAKAIFTGHSAVV |
| | | EDVAWHLLHESLFGSVADDQKLMIWDTRSNTTSKPSHLVDAHTAEV |
| | | NCLSFNPYSEFILATGSADKTVALWDLRNLKLKLHTFESHKDEIFQV |
| | | HWSPHNETILASSGTDRRLNVWDLSKIGEEQSAEDAEDGPPELLFIHG |
| | | GHTAKISDFSWNPNEPWVICSVSEDNIMQIWQMAENIYNDEESDVTT |
| | | SELEGQGS |
| 1108 | Cas-REST | MGTPKKKRKVMDKKYSIGLAIGTNSVGWAVITDEYKVPSKKFKVLG |
| | | NTDRHSIKKNLIGALLFDSGETAEATRLKRTARRRYTRRKNRICYLQ |
| | | EIFSNEMAKVDDSFFHRLEESFLVEEDKKHERHPIFGNIVDEVAYHEK |
| | | YPTIYHLRKKLVDSTDKADLRLIYLALAHMIKFRGHFLIEGDLNPDNS |
| | | DVDKLFIQLVQTYNQLFEENPINASGVDAKAILSARLSKSRRLENLIA |
| | | QLPGEKKNGLFGNLIALSLGLTPNFKSNFDLAEDAKLQLSKDTYDDD |
| | | LDNLLAQIGDQYADLFLAAKNLSDAILLSDILRVNTEITKAPLSASMI |
| | | KRYDEHHQDLTLLKALVRQQLPEKYKEIFFDQSKNGYAGYIDGGAS |
| | | QEEFYKFIKPILEKMDGTEELLVKLNREDLLRKQRTFDNGSIPHQIHL |
| | | GELHAILRRQEDFYPFLKDNREKIEKILTFRIPYYVGPLARGNSRFAW |
| | | MTRKSEETITPWNFEEVVDKGASAQSFIERMTNFDKNLPNEKVLPKH |
| | | SLLYEYFTVYNELTKVKYVTEGMRKPAFLSGEQKKAIVDLLFKTNR |
| | | KVTVKQLKEDYFKKIECFDSVEISGVEDRFNASLGTYHDLLKIIKDKD |
| | | FLDNEENEDILEDIVLTLTLFEDREMIEERLKTYAHLFDDKVMKQLK |
| | | RRRYTGWGRLSRKLINGIRDKQSGKTILDFLKSDGFANRNFMQLIHD |
| | | DSLTFKEDIQKAQVSGQGDSLHEHIANLAGSPAIKKGILQTVKVVDE |
| | | LVKVMGRHKPENIVIEMARENQTTQKGQKNSRERMKRIEEGIKELGS |
| | | QILKEHPVENTQLQNEKLYLYYLQNGRDMYVDQELDINRLSDYDVD |
| | | AIVPQSFLKDDSIDNKVLTRSDKNRGKSDNVPSEEVVKKMKNYWRQ |
| | | LLNAKLITQRKFDNLTKAERGGLSELDKAGFIKRQLVETRQITKHVA |
| | | QILDSRMNTKYDENDKLIREVKVITLKSKLVSDFRKDFQFYKVREIN |
| | | NYHHAHDAYLNAVVGTALIKKYPKLESEFVYGDYKVYDVRKMIAK |
| | | SEQEIGKATAKYFFYSNIMNFFKTEITLANGEIRKRPLIETNGETGEIV |
| | | WDKGRDFATVRKVLSMPQVNIVKKTEVQTGGFSKESILPKRNSDKLI |
| | | ARKKDWDPKKYGGFDSPTVAYSVLVVAKVEKGKSKKLKSVKELLG |
| | | ITIMERSSFEKNPIDFLEAKGYKEVKKDLIIKLPKYSLFELENGRKRML |
| | | ASAGELQKGNELALPSKYVNFLYLASHYEKLKGSPEDNEQKQLFVE |
| | | QHKHYLDEIIEQISEFSKRVILADANLDKVLSAYNKHRDKPIREQAEN |
| | | IIHLFTLTNLGAPAAFKYFDTTIDRKRYTSTKEVLDATLIHQSITGLYE |
| | | TRIDLSQLGGDPKKKRKVGGPSSGAPPPSGGSPAGSPTSTEEGTSESA |
| | | TPESGPGTSTEPSEGSAPGSPAGSPTSTEEGTSTEPSEGSAPGTSTEPSE |
| | | TGMATQVMGQSSGGGGLFTSSGNIGMALPNDMYDLHDLSKAELAA |
| | | PQLIMLANVALTGEVNGSCCDYLVGEERQMAELMPVGDNNFSDSEE |
| | | GEGLEESADIKGEPHGLENMELRSLELSVVEPQPVFEASGAPDIYSSN |
| | | KDLPPETPGAEDKGKSSKTKPFRCKPCQYEAESEEQFVHHIRVHSAK |
| | | KFFVEESAEKQAKARESGSSTAEEGDFSKGPIRCDRCGYNTNRYDHY |
| | | TAHLKHHTRAGDNERVYKCIICTYTTVSEYHWRKHLRNHFPRKVYT |
| | | CGKCNYFSDRKNNYVQHVRTHTGERPYKCELCPYSSSQKTHLTRHM |
| | | RTHSGEKPFKCDQCSYVASNQHEVTRHARQVHNGPKPLNCPHCDY |
| | | KTADRSNFKKHVELHVNPRQFNCPVCDYAASKKCNLQYHFKSKHPT |
| | | CPNKTMDVSKVKLKKTKKREADLPDNITNEKTEIEQTKIKGDVAGK |
| | | KNEKSVKAEKRDVSKEKKPSNNVSVIQVTTRTRKSVTEVKEMDVHT |
| | | GSNSEKFSKTKKSKRKLEVDSHSLHGPVNDEESSTKKKKKVESKSKN |
| | | NSQEVPKGDSKVEENKKQNTCMKKSTKKKTLKNKSSKKSSKPPQKE |
| | | PVEKGSAQMDPPQMGPAPTEAVQKGPVQVEPPPPMEHAQMEGAQI |
| | | RPAPDEPVQMEVVQEGPAQKELLPPVEPAQMVGAQIVLAHMELPPP |
| | | METAQTEVAQMGPAPMEPAQMEVAQVESAPMQVVQKEPVQMELS |
| | | PPMEVVQKEPVQIELSPPMEVVQKEPVKIELSPPIEVVQKEPVQMELS |
| | | PPMGVVQKEPAQREPPPPREPPLHMEPISKKPPLRKDKKEKSNMQSE |
| | | RARKEQVLIEVGLVPVKDSWLLKESVSTEDLSPPSPPLPKENLREEAS |
| | | GDQKLLNTGEGNKEAPLQKVGAEEADESLPGLAANINESTHISSSGQ |
| | | NLNTPEGETLNGKHQTDSIVCEMKMDTDQNTRENLTGINSTVEEPVS |
| | | PMLPPSAVEEREAVSKTALASPPATMAANESQEIDEDEGIHSHEGSDL |
| | | SDNMSEGSDDSGLHGARPVPQESSRKNAKEALAVKAAKGDFVCIFC |
| | | DRSFRKGKDYSKHLNRHLVNVYYLEEAAQGQE |
| 1109 | Cas- | MGTPKKKRKVMDKKYSIGLAIGTNSVGWAVITDEYKVPSKKFKVLG |
| | RCOR1 | NTDRHSIKKNLIGALLFDSGETAEATRLKRTARRRYTRRKNRICYLQ |
| | | EIFSNEMAKVDDSFFHRLEESFLVEEDKKHERHPIFGNIVDEVAYHEK |
| | | YPTIYHLRKKLVDSTDKADLRLIYLALAHMIKFRGHFLIEGDLNPDNS |
| | | DVDKLFIQLVQTYNQLFEENPINASGVDAKAILSARLSKSRRLENLIA |
| | | QLPGEKKNGLFGNLIALSLGLTPNFKSNFDLAEDAKLQLSKDTYDDD |
| | | LDNLLAQIGDQYADLFLAAKNLSDAILLSDILRVNTEITKAPLSASMI |
| | | KRYDEHHQDLTLLKALVRQQLPEKYKEIFFDQSKNGYAGYIDGGAS |
| | | QEEFYKFIKPILEKMDGTEELLVKLNREDLLRKQRTFDNGSIPHQIHL |
| | | GELHAILRRQEDFYPFLKDNREKIEKILTFRIPYYVGPLARGNSRFAW |
| | | MTRKSEETITPWNFEEVVDKGASAQSFIERMTNFDKNLPNEKVLPKH |
| | | SLLYEYFTVYNELTKVKYVTEGMRKPAFLSGEQKKAIVDLLFKTNR |
| | | KVTVKQLKEDYFKKIECFDSVEISGVEDRFNASLGTYHDLLKIIKDKD |
| | | FLDNEENEDILEDIVLTLTLFEDREMIEERLKTYAHLFDDKVMKQLK |
| | | RRRYTGWGRLSRKLINGIRDKQSGKTILDFLKSDGFANRNFMQLIHD |
| | | DSLTFKEDIQKAQVSGQGDSLHEHIANLAGSPAIKKGILQTVKVVDE |
| | | LVKVMGRHKPENIVIEMARENQTTQKGQKNSRERMKRIEEGIKELGS |
| | | QILKEHPVENTQLQNEKLYLYYLQNGRDMYVDQELDINRLSDYDVD |
| | | AIVPQSFLKDDSIDNKVLTRSDKNRGKSDNVPSEEVVKKMKNYWRQ |
| | | LLNAKLITQRKFDNLTKAERGGLSELDKAGFIKRQLVETRQITKHVA |
| | | QILDSRMNTKYDENDKLIREVKVITLKSKLVSDFRKDFQFYKVREIN |
| | | NYHHAHDAYLNAVVGTALIKKYPKLESEFVYGDYKVYDVRKMIAK |
| | | SEQEIGKATAKYFFYSNIMNFFKTEITLANGEIRKRPLIETNGETGEIV |
| | | WDKGRDFATVRKVLSMPQVNIVKKTEVQTGGFSKESILPKRNSDKLI |
| | | ARKKDWDPKKYGGFDSPTVAYSVLVVAKVEKGKSKKLKSVKELLG |
| | | ITIMERSSFEKNPIDFLEAKGYKEVKKDLIIKLPKYSLFELENGRKRML |
| | | ASAGELQKGNELALPSKYVNFLYLASHYEKLKGSPEDNEQKQLFVE |
| | | QHKHYLDEIIEQISEFSKRVILADANLDKVLSAYNKHRDKPIREQAEN |
| | | IIHLFTLTNLGAPAAFKYFDTTIDRKRYTSTKEVLDATLIHQSITGLYE |
| | | TRIDLSQLGGDPKKKRKVGGPSSGAPPPSGGSPAGSPTSTEEGTSESA |
| | | TPESGPGTSTEPSEGSAPGSPAGSPTSTEEGTSTEPSEGSAPGTSTEPSE |
| | | TGMPAMVEKGPEVSGKRRGRNNAAASASAAAASAAASAACASPAA |
| | | TAASGAAASSASAAAASAAAAPNNGQNKSLAAAAPNGNSSSNSWE |
| | | EGSSGSSSDEEHGGGGMRVGPQYQAVVPDFDPAKLARRSQERDNLG |
| | | MLVWSPNQNLSEAKLDEYIAIAKEKHGYNMEQALGMLFWHKHNIE |
| | | KSLADLPNFTPFPDEWTVEDKVLFEQAFSFHGKTFHRIQQMLPDKSI |
| | | ASLVKFYYSWKKTRTKTSVMDRHARKQKREREESEDELEEANGNN |
| | | PIDIEVDQNKESKKEVPPTETVPQVKKEKHSTQAKNRAKRKPPKGMF |
| | | LSQEDVEAVSANATAATTVLRQLDMELVSVKRQIQNIKQTNSALKE |
| | | KLDGGIEPYRLPEVIQKCNARWTTEEQLLAVQAIRKYGRDFQAISDVI |
| | | GNKSVVQVKNFFVNYRRRFNIDEVLQEWEAEHGKEETNGPSNQKPV |
| | | KSPDNSIKMPEEEDEAPVLDVRYASAS |
| 1110 | Cas-SIN3A | MGTPKKKRKVMDKKYSIGLAIGTNSVGWAVITDEYKVPSKKFKVLG |
| | | NTDRHSIKKNLIGALLFDSGETAEATRLKRTARRRYTRRKNRICYLQ |
| | | EIFSNEMAKVDDSFFHRLEESFLVEEDKKHERHPIFGNIVDEVAYHEK |
| | | YPTIYHLRKKLVDSTDKADLRLIYLALAHMIKFRGHFLIEGDLNPDNS |
| | | DVDKLFIQLVQTYNQLFEENPINASGVDAKAILSARLSKSRRLENLIA |
| | | QLPGEKKNGLFGNLIALSLGLTPNFKSNFDLAEDAKLQLSKDTYDDD |
| | | LDNLLAQIGDQYADLFLAAKNLSDAILLSDILRVNTEITKAPLSASMI |
| | | KRYDEHHQDLTLLKALVRQQLPEKYKEIFFDQSKNGYAGYIDGGAS |
| | | QEEFYKFIKPILEKMDGTEELLVKLNREDLLRKQRTFDNGSIPHQIHL |
| | | GELHAILRRQEDFYPFLKDNREKIEKILTFRIPYYVGPLARGNSRFAW |
| | | MTRKSEETITPWNFEEVVDKGASAQSFIERMTNFDKNLPNEKVLPKH |
| | | SLLYEYFTVYNELTKVKYVTEGMRKPAFLSGEQKKAIVDLLFKTNR |
| | | KVTVKQLKEDYFKKIECFDSVEISGVEDRFNASLGTYHDLLKIIKDKD |
| | | FLDNEENEDILEDIVLTLTLFEDREMIEERLKTYAHLFDDKVMKQLK |
| | | RRRYTGWGRLSRKLINGIRDKQSGKTILDFLKSDGFANRNFMQLIHD |
| | | DSLTFKEDIQKAQVSGQGDSLHEHIANLAGSPAIKKGILQTVKVVDE |
| | | LVKVMGRHKPENIVIEMARENQTTQKGQKNSRERMKRIEEGIKELGS |
| | | QILKEHPVENTQLQNEKLYLYYLQNGRDMYVDQELDINRLSDYDVD |
| | | AIVPQSFLKDDSIDNKVLTRSDKNRGKSDNVPSEEVVKKMKNYWRQ |
| | | LLNAKLITQRKFDNLTKAERGGLSELDKAGFIKRQLVETRQITKHVA |
| | | QILDSRMNTKYDENDKLIREVKVITLKSKLVSDFRKDFQFYKVREIN |
| | | NYHHAHDAYLNAVVGTALIKKYPKLESEFVYGDYKVYDVRKMIAK |
| | | SEQEIGKATAKYFFYSNIMNFFKTEITLANGEIRKRPLIETNGETGEIV |
| | | WDKGRDFATVRKVLSMPQVNIVKKTEVQTGGFSKESILPKRNSDKLI |
| | | ARKKDWDPKKYGGFDSPTVAYSVLVVAKVEKGKSKKLKSVKELLG |
| | | ITIMERSSFEKNPIDFLEAKGYKEVKKDLIIKLPKYSLFELENGRKRML |
| | | ASAGELQKGNELALPSKYVNFLYLASHYEKLKGSPEDNEQKQLFVE |
| | | QHKHYLDEIIEQISEFSKRVILADANLDKVLSAYNKHRDKPIREQAEN |
| | | IIHLFTLTNLGAPAAFKYFDTTIDRKRYTSTKEVLDATLIHQSITGLYE |
| | | TRIDLSQLGGDPKKKRKVGGPSSGAPPPSGGSPAGSPTSTEEGTSESA |
| | | TPESGPGTSTEPSEGSAPGSPAGSPTSTEEGTSTEPSEGSAPGTSTEPSE |
| | | TGMKRRLDDQESPVYAAQQRRIPGSTEAFPHQHRVLAPAPPVYEAV |
| | | SETMQSATGIQYSVTPSYQVSAMPQSSGSHGPAIAAVHSSHHHPTAV |
| | | QPHGGQVVQSHAHPAPPVAPVQGQQQFQRLKVEDALSYLDQVKLQ |
| | | FGSQPQVYNDFLDIMKEFKSQSIDTPGVISRVSQLFKGHPDLIMGFNT |
| | | FLPPGYKIEVQTNDMVNVTTPGQVHQIPTHGIQPQPQPPPQHPSQPSA |
| | | QSAPAPAQPAPQPPPAKVSKPSQLQAHTPASQQTPPLPPYASPRSPPV |
| | | QPHTPVTISLGTAPSLQNNQPVEFNHAINYVNKIKNRFQGQPDIYKAF |
| | | LEILHTYQKEQRNAKEAGGNYTPALTEQEVYAQVARLFKNQEDLLS |
| | | EFGQFLPDANSSVLLSKTTAEKVDSVRNDHGGTVKKPQLNNKPQRP |
| | | SQNGCQIRRHPTGTTPPVKKKPKLLNLKDSSMADASKHGGGTESLFF |
| | | DKVRKALRSAEAYENFLRCLVIFNQEVISRAELVQLVSPFLGKFPELF |
| | | NWFKNFLGYKESVHLETYPKERATEGIAMEIDYASCKRLGSSYRALP |
| | | KSYQQPKCTGRTPLCKEVLNDTWVSFPSWSEDSTFVSSKKTQYEEHI |
| | | YRCEDERFELDVVLETNLATIRVLEAIQKKLSRLSAEEQAKFRLDNTL |
| | | GGTSEVIHRKALQRIYADKAADIIDGLRKNPSIAVPIVLKRLKMKEEE |
| | | WREAQRGFNKVWREQNEKYYLKSLDHQGINFKQNDTKVLRSKSLL |
| | | NEIESIYDERQEQATEENAGVPVGPHLSLAYEDKQILEDAAALIIHHV |
| | | KRQTGIQKEDKYKIKQIMHHFIPDLLFAQRGDLSDVEEEEEEEMDVD |
| | | EATGAVKKHNGVGGSPPKSKLLFSNTAAQKLRGMDEVYNLFYVNN |
| | | NWYIFMRLHQILCLRLLRICSQAERQIEEENREREWEREVLGIKRDKS |
| | | DSPAIQLRLKEPMDVDVEDYYPAFLDMVRSLLDGNIDSSQYEDSLRE |
| | | MFTIHAYIAFTMDKLIQSIVRQLQHIVSDEICVQVTDLYLAENNNGAT |
| | | GGQLNTQNSRSLLESTYQRKAEQLMSDENCFKLMFIQSQGQVQLTIE |
| | | LLDTEEENSDDPVEAERWSDYVERYMNSDTTSPELREHLAQKPVFLP |
| | | RNLRRIRKCQRGREQQEKEGKEGNSKKTMENVDSLDKLECRFKLNS |
| | | YKMVYVIKSEDYMYRRTALLRAHQSHERVSKRLHQRFQAWVDKW |
| | | TKEHVPREMAAETSKWLMGEGLEGLVPCTTTCDTETLHFVSINKYR |
| | | VKYGTVFKAP |
| 1111 | Cas- | MGTPKKKRKVMDKKYSIGLAIGTNSVGWAVITDEYKVPSKKFKVLG |
| | HDAC5 | NTDRHSIKKNLIGALLFDSGETAEATRLKRTARRRYTRRKNRICYLQ |
| | | EIFSNEMAKVDDSFFHRLEESFLVEEDKKHERHPIFGNIVDEVAYHEK |
| | | YPTIYHLRKKLVDSTDKADLRLIYLALAHMIKFRGHFLIEGDLNPDNS |
| | | DVDKLFIQLVQTYNQLFEENPINASGVDAKAILSARLSKSRRLENLIA |
| | | QLPGEKKNGLFGNLIALSLGLTPNFKSNFDLAEDAKLQLSKDTYDDD |
| | | LDNLLAQIGDQYADLFLAAKNLSDAILLSDILRVNTEITKAPLSASMI |
| | | KRYDEHHQDLTLLKALVRQQLPEKYKEIFFDQSKNGYAGYIDGGAS |
| | | QEEFYKFIKPILEKMDGTEELLVKLNREDLLRKQRTFDNGSIPHQIHL |
| | | GELHAILRRQEDFYPFLKDNREKIEKILTFRIPYYVGPLARGNSRFAW |
| | | MTRKSEETITPWNFEEVVDKGASAQSFIERMTNFDKNLPNEKVLPKH |
| | | SLLYEYFTVYNELTKVKYVTEGMRKPAFLSGEQKKAIVDLLFKTNR |
| | | KVTVKQLKEDYFKKIECFDSVEISGVEDRFNASLGTYHDLLKIIKDKD |
| | | FLDNEENEDILEDIVLTLTLFEDREMIEERLKTYAHLFDDKVMKQLK |
| | | RRRYTGWGRLSRKLINGIRDKQSGKTILDFLKSDGFANRNFMQLIHD |
| | | DSLTFKEDIQKAQVSGQGDSLHEHIANLAGSPAIKKGILQTVKVVDE |
| | | LVKVMGRHKPENIVIEMARENQTTQKGQKNSRERMKRIEEGIKELGS |
| | | QILKEHPVENTQLQNEKLYLYYLQNGRDMYVDQELDINRLSDYDVD |
| | | AIVPQSFLKDDSIDNKVLTRSDKNRGKSDNVPSEEVVKKMKNYWRQ |
| | | LLNAKLITQRKFDNLTKAERGGLSELDKAGFIKRQLVETRQITKHVA |
| | | QILDSRMNTKYDENDKLIREVKVITLKSKLVSDFRKDFQFYKVREIN |
| | | NYHHAHDAYLNAVVGTALIKKYPKLESEFVYGDYKVYDVRKMIAK |
| | | SEQEIGKATAKYFFYSNIMNFFKTEITLANGEIRKRPLIETNGETGEIV |
| | | WDKGRDFATVRKVLSMPQVNIVKKTEVQTGGFSKESILPKRNSDKLI |
| | | ARKKDWDPKKYGGFDSPTVAYSVLVVAKVEKGKSKKLKSVKELLG |
| | | ITIMERSSFEKNPIDFLEAKGYKEVKKDLIIKLPKYSLFELENGRKRML |
| | | ASAGELQKGNELALPSKYVNFLYLASHYEKLKGSPEDNEQKQLFVE |
| | | QHKHYLDEIIEQISEFSKRVILADANLDKVLSAYNKHRDKPIREQAEN |
| | | IIHLFTLTNLGAPAAFKYFDTTIDRKRYTSTKEVLDATLIHQSITGLYE |
| | | TRIDLSQLGGDPKKKRKVGGPSSGAPPPSGGSPAGSPTSTEEGTSESA |
| | | TPESGPGTSTEPSEGSAPGSPAGSPTSTEEGTSTEPSEGSAPGTSTEPSE |
| | | TGMNSPNESDGMSGREPSLEILPRTSLHSIPVTVEVKPVLPRAMPSSM |
| | | GGGGGGSPSPVELRGALVGSVDPTLREQQLQQELLALKQQQQLQKQ |
| | | LLFAEFQKQHDHLTRQHEVQLQKHLKQQQEMLAAKQQQEMLAAK |
| | | RQQELEQQRQREQQRQEELEKQRLEQQLLILRNKEKSKESAIASTEV |
| | | KLRLQEFLLSKSKEPTPGGLNHSLPQHPKCWGAHHASLDQSSPPQSG |
| | | PPGTPPSYKLPLPGPYDSRDDFPLRKTASEPNLKVRSRLKQKVAERRS |
| | | SPLLRRKDGTVISTFKKRAVEITGAGPGASSVCNSAPGSGPSSPNSSHS |
| | | TIAENGFTGSVPNIPTEMLPQHRALPLDSSPNQFSLYTSPSLPNISLGL |
| | | QATVTVTNSHLTASPKLSTQQEAERQALQSLRQGGTLTGKFMSTSSI |
| | | PGCLLGVALEGDGSPHGHASLLQHVLLLEQARQQSTLIAVPLHGQSP |
| | | LVTGERVATSMRTVGKLPRHRPLSRTQSSPLPQSPQALQQLVMQQQ |
| | | HQQFLEKQKQQQLQLGKILTKTGELPRQPTTHPEETEEELTEQQEVL |
| | | LGEGALTMPREGSTESESTQEDLEEEDEEDDGEEEEDCIQVKDEEGE |
| | | SGAEEGPDLEEPGAGYKKLFSDAQPLQPLQVYQAPLSLATVPHQAL |
| | | GRTQSSPAAPGGMKSPPDQPVKHLFTTGVVYDTFMLKHQCMCGNT |
| | | HVHPEHAGRIQSIWSRLQETGLLSKCERIRGRKATLDEIQTVHSEYHT |
| | | LLYGTSPLNRQKLDSKKLLGPISQKMYAVLPCGGIGVDSDTVWNEM |
| | | HSSSAVRMAVGCLLELAFKVAAGELKNGFAIIRPPGHHAEESTAMGF |
| | | CFFNSVAITAKLLQQKLNVGKVLIVDWDIHHGNGTQQAFYNDPSVL |
| | | YISLHRYDNGNFFPGSGAPEEVGGGPGVGYNVNVAWTGGVDPPIGD |
| | | VEYLTAFRTVVMPIAHEFSPDVVLVSAGFDAVEGHLSPLGGYSVTAR |
| | | CFGHLTRQLMTLAGGRVVLALEGGHDLTAICDASEACVSALLSVEL |
| | | QPLDEAVLQQKPNINAVATLEKVIEIQSKHWSCVQKFAAGLGRSLRE |
| | | AQAGETEEAETVSAMALLSVGAEQAQAAAAREHSPRPAEEPMEQEP |
| | | AL |
| 1112 | (Hs)DNMT1- | MPARTAPARVPTLAVPAISLPDDVRRRLKDLERDSLTEKECVKEKLN |
| | Cas | LLHEFLQTEIKNQLCDLETKLRKEELSEEGYLAKVKSLLNKDLSLEN |
| | | GAHAYNREVNGRLENGNQARSEARRVGMADANSPPKPLSKPRTPR |
| | | RSKSDGEAKPEPSPSPRITRKSTRQTTITSHFAKGPAKRKPQEESERAK |
| | | SDESIKEEDKDQDEKRRRVTSRERVARPLPAEEPERAKSGTRTEKEEE |
| | | RDEKEEKRLRSQTKEPTPKQKLKEEPDREARAGVQADEDEDGDEKD |
| | | EKKHRSQPKDLAAKRRPEEKEPEKVNPQISDEKDEDEKEEKRRKTTP |
| | | KEPTEKKMARAKTVMNSKTHPPKCIQCGQYLDDPLKYGQHPPDAV |
| | | DEPQMLTNEKLSIFDANESGFESYEALPQHKLTCFSVYCKHGHLCPID |
| | | TGLIEKNIELFFSGSAKPIYDDDPSLEGGVNGKNLGPINEWWITGFDG |
| | | GEKALIGFSTSFAEYILMDPSPEYAPIFGLMQEKIYISKIVVEFLQSNSD |
| | | STYEDLINKIETTVPPSGLNLNRFTEDSLLRHAQFVVEQVESYDEAGD |
| | | SDEQPIFLTPCMRDLIKLAGVTLGQRRAQARRQTIRHSTREKDRGPT |
| | | KATTTKLVYQIFDTFFAEQIEKDDREDKENAFKRRRCGVCEVCQQPE |
| | | CGKCKACKDMVKFGGSGRSKQACQERRCPNMAMKEADDDEEVDD |
| | | NIPEMPSPKKMHQGKKKKQNKNRISWVGEAVKTDGKKSYYKKVCI |
| | | DAETLEVGDCVSVIPDDSSKPLYLARVTALWEDSSNGQMFHAHWFC |
| | | AGTDTVLGATSDPLELFLVDECEDMQLSYIHSKVKVIYKAPSENWA |
| | | MEGGMDPESLLEGDDGKTYFYQLWYDQDYARFESPPKTQPTEDNK |
| | | FKFCVSCARLAEMRQKEIPRVLEQLEDLDSRVLYYSATKNGILYRVG |
| | | DGVYLPPEAFTFNIKLSSPVKRPRKEPVDEDLYPEHYRKYSDYIKGSN |
| | | LDAPEPYRIGRIKEIFCPKKSNGRPNETDIKIRVNKFYRPENTHKSTPA |
| | | SYHADINLLYWSDEEAVVDFKAVQGRCTVEYGEDLPECVQVYSMG |
| | | GPNRFYFLEAYNAKSKSFEDPPNHARSPGNKGKGKGKGKGKPKSQA |
| | | CEPSEPEIEIKLPKLRTLDVFSGCGGLSEGFHQAGISDTLWAIEMWDP |
| | | AAQAFRLNNPGSTVFTEDCNILLKLVMAGETTNSRGQRLPQKGDVE |
| | | MLCGGPPCQGFSGMNRFNSRTYSKFKNSLVVSFLSYCDYYRPRFFLL |
| | | ENVRNFVSFKRSMVLKLTLRCLVRMGYQCTFGVLQAGQYGVAQTR |
| | | RRAIILAAAPGEKLPLFPEPLHVFAPRACQLSVVVDDKKFVSNITRLS |
| | | SGPFRTITVRDTMSDLPEVRNGASALEISYNGEPQSWFQRQLRGAQY |
| | | QPILRDHICKDMSALVAARMRHIPLAPGSDWRDLPNIEVRLSDGTMA |
| | | RKLRYTHHDRKNGRSSSGALRGVCSCVEAGKACDPAARQFNTLIPW |
| | | CLPHTGNRHNHWAGLYGRLEWDGFFSTTVTNPEPMGKQGRVLHPE |
| | | QHRVVSVRECARSQGFPDTYRLFGNILDKHRQVGNAVPPPLAKAIGL |
| | | EIKLCMLAKARESASAKIKEEEAAKDGGPSSGAPPPSGGSPAGSPTST |
| | | EEGTSESATPESGPGTSTEPSEGSAPGSPAGSPTSTEEGTSTEPSEGSAP |
| | | GTSTEPSEPKKKRKVMDKKYSIGLAIGTNSVGWAVITDEYKVPSKKF |
| | | KVLGNTDRHSIKKNLIGALLFDSGETAEATRLKRTARRRYTRRKNRI |
| | | CYLQEIFSNEMAKVDDSFFHRLEESFLVEEDKKHERHPIFGNIVDEVA |
| | | YHEKYPTIYHLRKKLVDSTDKADLRLIYLALAHMIKFRGHFLIEGDL |
| | | NPDNSDVDKLFIQLVQTYNQLFEENPINASGVDAKAILSARLSKSRRL |
| | | ENLIAQLPGEKKNGLFGNLIALSLGLTPNFKSNFDLAEDAKLQLSKDT |
| | | YDDDLDNLLAQIGDQYADLFLAAKNLSDAILLSDILRVNTEITKAPLS |
| | | ASMIKRYDEHHQDLTLLKALVRQQLPEKYKEIFFDQSKNGYAGYID |
| | | GGASQEEFYKFIKPILEKMDGTEELLVKLNREDLLRKQRTFDNGSIPH |
| | | QIHLGELHAILRRQEDFYPFLKDNREKIEKILTFRIPYYVGPLARGNSR |
| | | FAWMTRKSEETITPWNFEEVVDKGASAQSFIERMTNFDKNLPNEKV |
| | | LPKHSLLYEYFTVYNELTKVKYVTEGMRKPAFLSGEQKKAIVDLLF |
| | | KTNRKVTVKQLKEDYFKKIECFDSVEISGVEDRFNASLGTYHDLLKII |
| | | KDKDFLDNEENEDILEDIVLTLTLFEDREMIEERLKTYAHLFDDKVM |
| | | KQLKRRRYTGWGRLSRKLINGIRDKQSGKTILDFLKSDGFANRNFM |
| | | QLIHDDSLTFKEDIQKAQVSGQGDSLHEHIANLAGSPAIKKGILQTVK |
| | | VVDELVKVMGRHKPENIVIEMARENQTTQKGQKNSRERMKRIEEGI |
| | | KELGSQILKEHPVENTQLQNEKLYLYYLQNGRDMYVDQELDINRLS |
| | | DYDVDAIVPQSFLKDDSIDNKVLTRSDKNRGKSDNVPSEEVVKKMK |
| | | NYWRQLLNAKLITQRKFDNLTKAERGGLSELDKAGFIKRQLVETRQI |
| | | TKHVAQILDSRMNTKYDENDKLIREVKVITLKSKLVSDFRKDFQFYK |
| | | VREINNYHHAHDAYLNAVVGTALIKKYPKLESEFVYGDYKVYDVR |
| | | KMIAKSEQEIGKATAKYFFYSNIMNFFKTEITLANGEIRKRPLIETNGE |
| | | TGEIVWDKGRDFATVRKVLSMPQVNIVKKTEVQTGGFSKESILPKRN |
| | | SDKLIARKKDWDPKKYGGFDSPTVAYSVLVVAKVEKGKSKKLKSV |
| | | KELLGITIMERSSFEKNPIDFLEAKGYKEVKKDLIIKLPKYSLFELENG |
| | | RKRMLASAGELQKGNELALPSKYVNFLYLASHYEKLKGSPEDNEQK |
| | | QLFVEQHKHYLDEIIEQISEFSKRVILADANLDKVLSAYNKHRDKPIR |
| | | EQAENIIHLFTLTNLGAPAAFKYFDTTIDRKRYTSTKEVLDATLIHQSI |
| | | TGLYETRIDLSQLGGDPKKKRKV |
| 1113 | (Hs)DNMT3A- | MPAMPSSGPGDTSSSAAEREEDRKDGEEQEEPRGKEERQEPSTTARK |
| | Cas | VGRPGRKRKHPPVESGDTPKDPAVISKSPSMAQDSGASELLPNGDLE |
| | | KRSEPQPEEGSPAGGQKGGAPAEGEGAAETLPEASRAVENGCCTPKE |
| | | GRGAPAEAGKEQKETNIESMKMEGSRGRLRGGLGWESSLRQRPMPR |
| | | LTFQAGDPYYISKRKRDEWLARWKREAEKKAKVIAGMNAVEENQG |
| | | PGESQKVEEASPPAVQQPTDPASPTVATTPEPVGSDAGDKNATKAG |
| | | DDEPEYEDGRGFGIGELVWGKLRGFSWWPGRIVSWWMTGRSRAAE |
| | | GTRWVMWFGDGKFSVVCVEKLMPLSSFCSAFHQATYNKQPMYRK |
| | | AIYEVLQVASSRAGKLFPVCHDSDESDTAKAVEVQNKPMIEWALGG |
| | | FQPSGPKGLEPPEEEKNPYKEVYTDMWVEPEAAAYAPPPPAKKPRK |
| | | STAEKPKVKEIIDERTRERLVYEVRQKCRNIEDICISCGSLNVTLEHPL |
| | | FVGGMCQNCKNCFLECAYQYDDDGYQSYCTICCGGREVLMCGNNN |
| | | CCRCFCVECVDLLVGPGAAQAAIKEDPWNCYMCGHKGTYGLLRRR |
| | | EDWPSRLQMFFANNHDQEFDPPKVYPPVPAEKRKPIRVLSLFDGIAT |
| | | GLLVLKDLGIQVDRYIASEVCEDSITVGMVRHQGKIMYVGDVRSVT |
| | | QKHIQEWGPFDLVIGGSPCNDLSIVNPARKGLYEGTGRLFFEFYRLLH |
| | | DARPKEGDDRPFFWLFENVVAMGVSDKRDISRFLESNPVMIDAKEV |
| | | SAAHRARYFWGNLPGMNRPLASTVNDKLELQECLEHGRIAKFSKVR |
| | | TITTRSNSIKQGKDQHFPVFMNEKEDILWCTEMERVFGFPVHYTDVS |
| | | NMSRLARQRLLGRSWSVPVIRHLFAPLKEYFACVGGPSSGAPPPSGG |
| | | SPAGSPTSTEEGTSESATPESGPGTSTEPSEGSAPGSPAGSPTSTEEGTS |
| | | TEPSEGSAPGTSTEPSEPKKKRKVMDKKYSIGLAIGTNSVGWAVITD |
| | | EYKVPSKKFKVLGNTDRHSIKKNLIGALLFDSGETAEATRLKRTARR |
| | | RYTRRKNRICYLQEIFSNEMAKVDDSFFHRLEESFLVEEDKKHERHPI |
| | | FGNIVDEVAYHEKYPTIYHLRKKLVDSTDKADLRLIYLALAHMIKFR |
| | | GHFLIEGDLNPDNSDVDKLFIQLVQTYNQLFEENPINASGVDAKAILS |
| | | ARLSKSRRLENLIAQLPGEKKNGLFGNLIALSLGLTPNFKSNFDLAED |
| | | AKLQLSKDTYDDDLDNLLAQIGDQYADLFLAAKNLSDAILLSDILRV |
| | | NTEITKAPLSASMIKRYDEHHQDLTLLKALVRQQLPEKYKEIFFDQS |
| | | KNGYAGYIDGGASQEEFYKFIKPILEKMDGTEELLVKLNREDLLRKQ |
| | | RTFDNGSIPHQIHLGELHAILRRQEDFYPFLKDNREKIEKILTFRIPYY |
| | | VGPLARGNSRFAWMTRKSEETITPWNFEEVVDKGASAQSFIERMTN |
| | | FDKNLPNEKVLPKHSLLYEYFTVYNELTKVKYVTEGMRKPAFLSGE |
| | | QKKAIVDLLFKTNRKVTVKQLKEDYFKKIECFDSVEISGVEDRFNAS |
| | | LGTYHDLLKIIKDKDFLDNEENEDILEDIVLTLTLFEDREMIEERLKTY |
| | | AHLFDDKVMKQLKRRRYTGWGRLSRKLINGIRDKQSGKTILDFLKS |
| | | DGFANRNFMQLIHDDSLTFKEDIQKAQVSGQGDSLHEHIANLAGSPA |
| | | IKKGILQTVKVVDELVKVMGRHKPENIVIEMARENQTTQKGQKNSR |
| | | ERMKRIEEGIKELGSQILKEHPVENTQLQNEKLYLYYLQNGRDMYV |
| | | DQELDINRLSDYDVDAIVPQSFLKDDSIDNKVLTRSDKNRGKSDNVP |
| | | SEEVVKKMKNYWRQLLNAKLITQRKFDNLTKAERGGLSELDKAGFI |
| | | KRQLVETRQITKHVAQILDSRMNTKYDENDKLIREVKVITLKSKLVS |
| | | DFRKDFQFYKVREINNYHHAHDAYLNAVVGTALIKKYPKLESEFVY |
| | | GDYKVYDVRKMIAKSEQEIGKATAKYFFYSNIMNFFKTEITLANGEI |
| | | RKRPLIETNGETGEIVWDKGRDFATVRKVLSMPQVNIVKKTEVQTG |
| | | GFSKESILPKRNSDKLIARKKDWDPKKYGGFDSPTVAYSVLVVAKV |
| | | EKGKSKKLKSVKELLGITIMERSSFEKNPIDFLEAKGYKEVKKDLIIK |
| | | LPKYSLFELENGRKRMLASAGELQKGNELALPSKYVNFLYLASHYE |
| | | KLKGSPEDNEQKQLFVEQHKHYLDEIIEQISEFSKRVILADANLDKVL |
| | | SAYNKHRDKPIREQAENIIHLFTLTNLGAPAAFKYFDTTIDRKRYTST |
| | | KEVLDATLIHQSITGLYETRIDLSQLGGDPKKKRKV |
| 1114 | (Hs)DNMT3A | MNHDQEFDPPKVYPPVPAEKRKPIRVLSLFDGIATGLLVLKDLGIQV |
| | (CD)-Cas | DRYIASEVCEDSITVGMVRHQGKIMYVGDVRSVTQKHIQEWGPFDL |
| | | VIGGSPCNDLSIVNPARKGLYEGTGRLFFEFYRLLHDARPKEGDDRPF |
| | | FWLFENVVAMGVSDKRDISRFLESNPVMIDAKEVSAAHRARYFWG |
| | | NLPGMNRPLASTVNDKLELQECLEHGRIAKFSKVRTITTRSNSIKQGK |
| | | DQHFPVFMNEKEDILWCTEMERVFGFPVHYTDVSNMSRLARQRLLG |
| | | RSWSVPVIRHLFAPLKEYFACVGGPSSGAPPPSGGSPAGSPTSTEEGT |
| | | SESATPESGPGTSTEPSEGSAPGSPAGSPTSTEEGTSTEPSEGSAPGTST |
| | | EPSEPKKKRKVMDKKYSIGLAIGTNSVGWAVITDEYKVPSKKFKVL |
| | | GNTDRHSIKKNLIGALLFDSGETAEATRLKRTARRRYTRRKNRICYL |
| | | QEIFSNEMAKVDDSFFHRLEESFLVEEDKKHERHPIFGNIVDEVAYHE |
| | | KYPTIYHLRKKLVDSTDKADLRLIYLALAHMIKFRGHFLIEGDLNPD |
| | | NSDVDKLFIQLVQTYNQLFEENPINASGVDAKAILSARLSKSRRLENL |
| | | IAQLPGEKKNGLFGNLIALSLGLTPNFKSNFDLAEDAKLQLSKDTYD |
| | | DDLDNLLAQIGDQYADLFLAAKNLSDAILLSDILRVNTEITKAPLSAS |
| | | MIKRYDEHHQDLTLLKALVRQQLPEKYKEIFFDQSKNGYAGYIDGG |
| | | ASQEEFYKFIKPILEKMDGTEELLVKLNREDLLRKQRTFDNGSIPHQI |
| | | HLGELHAILRRQEDFYPFLKDNREKIEKILTFRIPYYVGPLARGNSRF |
| | | AWMTRKSEETITPWNFEEVVDKGASAQSFIERMTNFDKNLPNEKVL |
| | | PKHSLLYEYFTVYNELTKVKYVTEGMRKPAFLSGEQKKAIVDLLFK |
| | | TNRKVTVKQLKEDYFKKIECFDSVEISGVEDRFNASLGTYHDLLKIIK |
| | | DKDFLDNEENEDILEDIVLTLTLFEDREMIEERLKTYAHLFDDKVMK |
| | | QLKRRRYTGWGRLSRKLINGIRDKQSGKTILDFLKSDGFANRNFMQL |
| | | IHDDSLTFKEDIQKAQVSGQGDSLHEHIANLAGSPAIKKGILQTVKVV |
| | | DELVKVMGRHKPENIVIEMARENQTTQKGQKNSRERMKRIEEGIKE |
| | | LGSQILKEHPVENTQLQNEKLYLYYLQNGRDMYVDQELDINRLSDY |
| | | DVDAIVPQSFLKDDSIDNKVLTRSDKNRGKSDNVPSEEVVKKMKNY |
| | | WRQLLNAKLITQRKFDNLTKAERGGLSELDKAGFIKRQLVETRQITK |
| | | HVAQILDSRMNTKYDENDKLIREVKVITLKSKLVSDFRKDFQFYKVR |
| | | EINNYHHAHDAYLNAVVGTALIKKYPKLESEFVYGDYKVYDVRKMI |
| | | AKSEQEIGKATAKYFFYSNIMNFFKTEITLANGEIRKRPLIETNGETGE |
| | | IVWDKGRDFATVRKVLSMPQVNIVKKTEVQTGGFSKESILPKRNSDK |
| | | LIARKKDWDPKKYGGFDSPTVAYSVLVVAKVEKGKSKKLKSVKEL |
| | | LGITIMERSSFEKNPIDFLEAKGYKEVKKDLIIKLPKYSLFELENGRKR |
| | | MLASAGELQKGNELALPSKYVNFLYLASHYEKLKGSPEDNEQKQLF |
| | | VEQHKHYLDEIIEQISEFSKRVILADANLDKVLSAYNKHRDKPIREQA |
| | | ENIIHLFTLTNLGAPAAFKYFDTTIDRKRYTSTKEVLDATLIHQSITGL |
| | | YETRIDLSQLGGDPKKKRKV |
| 1115 | (Hs/Hs) | MNHDQEFDPPKVYPPVPAEKRKPIRVLSLFDGIATGLLVLKDLGIQV |
| | DNMT3A(CD)/ | DRYIASEVCEDSITVGMVRHQGKIMYVGDVRSVTQKHIQEWGPFDL |
| | L(CD)-Cas | VIGGSPCNDLSIVNPARKGLYEGTGRLFFEFYRLLHDARPKEGDDRPF |
| | | FWLFENVVAMGVSDKRDISRFLESNPVMIDAKEVSAAHRARYFWG |
| | | NLPGMNRPLASTVNDKLELQECLEHGRIAKFSKVRTITTRSNSIKQGK |
| | | DQHFPVFMNEKEDILWCTEMERVFGFPVHYTDVSNMSRLARQRLLG |
| | | RSWSVPVIRHLFAPLKEYFACVSSGNSNANSRGPSFSSGLVPLSLRGS |
| | | HNPLEMFETVPVWRRQPVRVLSLFEDIKKELTSLGFLESGSDPGQLK |
| | | HVVDVTDTVRKDVEEWGPFDLVYGATPPLGHTCDRPPSWYLFQFH |
| | | RLLQYARPKPGSPRPFFWMFVDNLVLNKEDLDVASRFLEMEPVTIPD |
| | | VHGGSLQNAVRVWSNIPAIRSRHWALVSEEELSLLAQNKQSSKLAA |
| | | KWPTKLVKNCFLPLREYFKYFSTELTSSLGGPSSGAPPPSGGSPAGSP |
| | | TSTEEGTSESATPESGPGTSTEPSEGSAPGSPAGSPTSTEEGTSTEPSEG |
| | | SAPGTSTEPSEPKKKRKVMDKKYSIGLAIGTNSVGWAVITDEYKVPS |
| | | KKFKVLGNTDRHSIKKNLIGALLFDSGETAEATRLKRTARRRYTRRK |
| | | NRICYLQEIFSNEMAKVDDSFFHRLEESFLVEEDKKHERHPIFGNIVD |
| | | EVAYHEKYPTIYHLRKKLVDSTDKADLRLIYLALAHMIKFRGHFLIE |
| | | GDLNPDNSDVDKLFIQLVQTYNQLFEENPINASGVDAKAILSARLSK |
| | | SRRLENLIAQLPGEKKNGLFGNLIALSLGLTPNFKSNFDLAEDAKLQL |
| | | SKDTYDDDLDNLLAQIGDQYADLFLAAKNLSDAILLSDILRVNTEIT |
| | | KAPLSASMIKRYDEHHQDLTLLKALVRQQLPEKYKEIFFDQSKNGY |
| | | AGYIDGGASQEEFYKFIKPILEKMDGTEELLVKLNREDLLRKQRTFD |
| | | NGSIPHQIHLGELHAILRRQEDFYPFLKDNREKIEKILTFRIPYYVGPL |
| | | ARGNSRFAWMTRKSEETITPWNFEEVVDKGASAQSFIERMTNFDKN |
| | | LPNEKVLPKHSLLYEYFTVYNELTKVKYVTEGMRKPAFLSGEQKKA |
| | | IVDLLFKTNRKVTVKQLKEDYFKKIECFDSVEISGVEDRFNASLGTY |
| | | HDLLKIIKDKDFLDNEENEDILEDIVLTLTLFEDREMIEERLKTYAHLF |
| | | DDKVMKQLKRRRYTGWGRLSRKLINGIRDKQSGKTILDFLKSDGFA |
| | | NRNFMQLIHDDSLTFKEDIQKAQVSGQGDSLHEHIANLAGSPAIKKGI |
| | | LQTVKVVDELVKVMGRHKPENIVIEMARENQTTQKGQKNSRERMK |
| | | RIEEGIKELGSQILKEHPVENTQLQNEKLYLYYLQNGRDMYVDQELD |
| | | INRLSDYDVDAIVPQSFLKDDSIDNKVLTRSDKNRGKSDNVPSEEVV |
| | | KKMKNYWRQLLNAKLITQRKFDNLTKAERGGLSELDKAGFIKRQLV |
| | | ETRQITKHVAQILDSRMNTKYDENDKLIREVKVITLKSKLVSDFRKD |
| | | FQFYKVREINNYHHAHDAYLNAVVGTALIKKYPKLESEFVYGDYKV |
| | | YDVRKMIAKSEQEIGKATAKYFFYSNIMNFFKTEITLANGEIRKRPLI |
| | | ETNGETGEIVWDKGRDFATVRKVLSMPQVNIVKKTEVQTGGFSKESI |
| | | LPKRNSDKLIARKKDWDPKKYGGFDSPTVAYSVLVVAKVEKGKSK |
| | | KLKSVKELLGITIMERSSFEKNPIDFLEAKGYKEVKKDLIIKLPKYSLF |
| | | ELENGRKRMLASAGELQKGNELALPSKYVNFLYLASHYEKLKGSPE |
| | | DNEQKQLFVEQHKHYLDEIIEQISEFSKRVILADANLDKVLSAYNKH |
| | | RDKPIREQAENIIHLFTLTNLGAPAAFKYFDTTIDRKRYTSTKEVLDA |
| | | TLIHQSITGLYETRIDLSQLGGDPKKKRKV |
| 1116 | (Hs)DNMT3B- | MKGDTRHLNGEEDAGGREDSILVNGACSDQSSDSPPILEAIRTPEIRG |
| | Cas | RRSSSRLSKREVSSLLSYTQDLTGDGDGEDGDGSDTPVMPKLFRETR |
| | | TRSESPAVRTRNNNSVSSRERHRPSPRSTRGRQGRNHVDESPVEFPAT |
| | | RSLRRRATASAGTPWPSPPSSYLTIDLTDDTEDTHGTPQSSSTPYARL |
| | | AQDSQQGGMESPQVEADSGDGDSSEYQDGKEFGIGDLVWGKIKGFS |
| | | WWPAMVVSWKATSKRQAMSGMRWVQWFGDGKFSEVSADKLVAL |
| | | GLFSQHFNLATFNKLVSYRKAMYHALEKARVRAGKTFPSSPGDSLE |
| | | DQLKPMLEWAHGGFKPTGIEGLKPNNTQPVVNKSKVRRAGSRKLES |
| | | RKYENKTRRRTADDSATSDYCPAPKRLKTNCYNNGKDRGDEDQSR |
| | | EQMASDVANNKSSLEDGCLSCGRKNPVSFHPLFEGGLCQTCRDRFL |
| | | ELFYMYDDDGYQSYCTVCCEGRELLLCSNTSCCRCFCVECLEVLVG |
| | | TGTAAEAKLQEPWSCYMCLPQRCHGVLRRRKDWNVRLQAFFTSDT |
| | | GLEYEAPKLYPAIPAARRRPIRVLSLFDGIATGYLVLKELGIKVGKYV |
| | | ASEVCEESIAVGTVKHEGNIKYVNDVRNITKKNIEEWGPFDLVIGGSP |
| | | CNDLSNVNPARKGLYEGTGRLFFEFYHLLNYSRPKEGDDRPFFWMF |
| | | ENVVAMKVGDKRDISRFLECNPVMIDAIKVSAAHRARYFWGNLPG |
| | | MNRPVIASKNDKLELQDCLEYNRIAKLKKVQTITTKSNSIKQGKNQL |
| | | FPVVMNGKEDVLWCTELERIFGFPVHYTDVSNMGRGARQKLLGRS |
| | | WSVPVIRHLFAPLKDYFACEGGPSSGAPPPSGGSPAGSPTSTEEGTSE |
| | | SATPESGPGTSTEPSEGSAPGSPAGSPTSTEEGTSTEPSEGSAPGTSTEP |
| | | SEPKKKRKVMDKKYSIGLAIGTNSVGWAVITDEYKVPSKKFKVLGN |
| | | TDRHSIKKNLIGALLFDSGETAEATRLKRTARRRYTRRKNRICYLQEI |
| | | FSNEMAKVDDSFFHRLEESFLVEEDKKHERHPIFGNIVDEVAYHEKY |
| | | PTIYHLRKKLVDSTDKADLRLIYLALAHMIKFRGHFLIEGDLNPDNSD |
| | | VDKLFIQLVQTYNQLFEENPINASGVDAKAILSARLSKSRRLENLIAQ |
| | | LPGEKKNGLFGNLIALSLGLTPNFKSNFDLAEDAKLQLSKDTYDDDL |
| | | DNLLAQIGDQYADLFLAAKNLSDAILLSDILRVNTEITKAPLSASMIK |
| | | RYDEHHQDLTLLKALVRQQLPEKYKEIFFDQSKNGYAGYIDGGASQ |
| | | EEFYKFIKPILEKMDGTEELLVKLNREDLLRKQRTFDNGSIPHQIHLG |
| | | ELHAILRRQEDFYPFLKDNREKIEKILTFRIPYYVGPLARGNSRFAWM |
| | | TRKSEETITPWNFEEVVDKGASAQSFIERMTNFDKNLPNEKVLPKHS |
| | | LLYEYFTVYNELTKVKYVTEGMRKPAFLSGEQKKAIVDLLFKTNRK |
| | | VTVKQLKEDYFKKIECFDSVEISGVEDRFNASLGTYHDLLKIIKDKDF |
| | | LDNEENEDILEDIVLTLTLFEDREMIEERLKTYAHLFDDKVMKQLKR |
| | | RRYTGWGRLSRKLINGIRDKQSGKTILDFLKSDGFANRNFMQLIHDD |
| | | SLTFKEDIQKAQVSGQGDSLHEHIANLAGSPAIKKGILQTVKVVDEL |
| | | VKVMGRHKPENIVIEMARENQTTQKGQKNSRERMKRIEEGIKELGS |
| | | QILKEHPVENTQLQNEKLYLYYLQNGRDMYVDQELDINRLSDYDVD |
| | | AIVPQSFLKDDSIDNKVLTRSDKNRGKSDNVPSEEVVKKMKNYWRQ |
| | | LLNAKLITQRKFDNLTKAERGGLSELDKAGFIKRQLVETRQITKHVA |
| | | QILDSRMNTKYDENDKLIREVKVITLKSKLVSDFRKDFQFYKVREIN |
| | | NYHHAHDAYLNAVVGTALIKKYPKLESEFVYGDYKVYDVRKMIAK |
| | | SEQEIGKATAKYFFYSNIMNFFKTEITLANGEIRKRPLIETNGETGEIV |
| | | WDKGRDFATVRKVLSMPQVNIVKKTEVQTGGFSKESILPKRNSDKLI |
| | | ARKKDWDPKKYGGFDSPTVAYSVLVVAKVEKGKSKKLKSVKELLG |
| | | ITIMERSSFEKNPIDFLEAKGYKEVKKDLIIKLPKYSLFELENGRKRML |
| | | ASAGELQKGNELALPSKYVNFLYLASHYEKLKGSPEDNEQKQLFVE |
| | | QHKHYLDEIIEQISEFSKRVILADANLDKVLSAYNKHRDKPIREQAEN |
| | | IIHLFTLTNLGAPAAFKYFDTTIDRKRYTSTKEVLDATLIHQSITGLYE |
| | | TRIDLSQLGGDPKKKRKV |
| 1117 | (Hs)DNMT3B | MIRVLSLFDGIATGYLVLKELGIKVGKYVASEVCEESIAVGTVKHEG |
| | (CD)-Cas | NIKYVNDVRNITKKNIEEWGPFDLVIGGSPCNDLSNVNPARKGLYEG |
| | | TGRLFFEFYHLLNYSRPKEGDDRPFFWMFENVVAMKVGDKRDISRF |
| | | LECNPVMIDAIKVSAAHRARYFWGNLPGMNRPVIASKNDKLELQDC |
| | | LEYNRIAKLKKVQTITTKSNSIKQGKNQLFPVVMNGKEDVLWCTEL |
| | | ERIFGFPVHYTDVSNMGRGARQKLLGRSWSVPVIRHLFAPLKDYFAC |
| | | EGGPSSGAPPPSGGSPAGSPTSTEEGTSESATPESGPGTSTEPSEGSAP |
| | | GSPAGSPTSTEEGTSTEPSEGSAPGTSTEPSEPKKKRKVMDKKYSIGL |
| | | AIGTNSVGWAVITDEYKVPSKKFKVLGNTDRHSIKKNLIGALLFDSG |
| | | ETAEATRLKRTARRRYTRRKNRICYLQEIFSNEMAKVDDSFFHRLEE |
| | | SFLVEEDKKHERHPIFGNIVDEVAYHEKYPTIYHLRKKLVDSTDKAD |
| | | LRLIYLALAHMIKFRGHFLIEGDLNPDNSDVDKLFIQLVQTYNQLFEE |
| | | NPINASGVDAKAILSARLSKSRRLENLIAQLPGEKKNGLFGNLIALSL |
| | | GLTPNFKSNFDLAEDAKLQLSKDTYDDDLDNLLAQIGDQYADLFLA |
| | | AKNLSDAILLSDILRVNTEITKAPLSASMIKRYDEHHQDLTLLKALVR |
| | | QQLPEKYKEIFFDQSKNGYAGYIDGGASQEEFYKFIKPILEKMDGTEE |
| | | LLVKLNREDLLRKQRTFDNGSIPHQIHLGELHAILRRQEDFYPFLKDN |
| | | REKIEKILTFRIPYYVGPLARGNSRFAWMTRKSEETITPWNFEEVVDK |
| | | GASAQSFIERMTNFDKNLPNEKVLPKHSLLYEYFTVYNELTKVKYVT |
| | | EGMRKPAFLSGEQKKAIVDLLFKTNRKVTVKQLKEDYFKKIECFDSV |
| | | EISGVEDRFNASLGTYHDLLKIIKDKDFLDNEENEDILEDIVLTLTLFE |
| | | DREMIEERLKTYAHLFDDKVMKQLKRRRYTGWGRLSRKLINGIRDK |
| | | QSGKTILDFLKSDGFANRNFMQLIHDDSLTFKEDIQKAQVSGQGDSL |
| | | HEHIANLAGSPAIKKGILQTVKVVDELVKVMGRHKPENIVIEMAREN |
| | | QTTQKGQKNSRERMKRIEEGIKELGSQILKEHPVENTQLQNEKLYLY |
| | | YLQNGRDMYVDQELDINRLSDYDVDAIVPQSFLKDDSIDNKVLTRS |
| | | DKNRGKSDNVPSEEVVKKMKNYWRQLLNAKLITQRKFDNLTKAER |
| | | GGLSELDKAGFIKRQLVETRQITKHVAQILDSRMNTKYDENDKLIRE |
| | | VKVITLKSKLVSDFRKDFQFYKVREINNYHHAHDAYLNAVVGTALI |
| | | KKYPKLESEFVYGDYKVYDVRKMIAKSEQEIGKATAKYFFYSNIMN |
| | | FFKTEITLANGEIRKRPLIETNGETGEIVWDKGRDFATVRKVLSMPQV |
| | | NIVKKTEVQTGGFSKESILPKRNSDKLIARKKDWDPKKYGGFDSPTV |
| | | AYSVLVVAKVEKGKSKKLKSVKELLGITIMERSSFEKNPIDFLEAKG |
| | | YKEVKKDLIIKLPKYSLFELENGRKRMLASAGELQKGNELALPSKYV |
| | | NFLYLASHYEKLKGSPEDNEQKQLFVEQHKHYLDEIIEQISEFSKRVI |
| | | LADANLDKVLSAYNKHRDKPIREQAENIIHLFTLTNLGAPAAFKYFD |
| | | TTIDRKRYTSTKEVLDATLIHQSITGLYETRIDLSQLGGDPKKKRKV |
| 1118 | (Hs/Mm) | MIRVLSLFDGIATGYLVLKELGIKVGKYVASEVCEESIAVGTVKHEG |
| | DNMT3B(CD)/ | NIKYVNDVRNITKKNIEEWGPFDLVIGGSPCNDLSNVNPARKGLYEG |
| | L(CD)-Cas | TGRLFFEFYHLLNYSRPKEGDDRPFFWMFENVVAMKVGDKRDISRF |
| | | LECNPVMIDAIKVSAAHRARYFWGNLPGMNRPVIASKNDKLELQDC |
| | | LEYNRIAKLKKVQTITTKSNSIKQGKNQLFPVVMNGKEDVLWCTEL |
| | | ERIFGFPVHYTDVSNMGRGARQKLLGRSWSVPVIRHLFAPLKDYFAC |
| | | ESSGNSNANSRGPSFSSGLVPLSLRGSHMGPMEIYKTVSAWKRQPVR |
| | | VLSLFRNIDKVLKSLGFLESGSGSGGGTLKYVEDVTNVVRRDVEKW |
| | | GPFDLVYGSTQPLGSSCDRCPGWYMFQFHRILQYALPRQESQRPFFW |
| | | IFMDNLLLTEDDQETTTRFLQTEAVTLQDVRGRDYQNAMRVWSNIP |
| | | GLKSKHAPLTPKEEEYLQAQVRSRSKLDAPKVDLLVKNCLLPLREYF |
| | | KYFSQNSLPLGGPSSGAPPPSGGSPAGSPTSTEEGTSESATPESGPGTS |
| | | TEPSEGSAPGSPAGSPTSTEEGTSTEPSEGSAPGTSTEPSEPKKKRKVM |
| | | DKKYSIGLAIGTNSVGWAVITDEYKVPSKKFKVLGNTDRHSIKKNLI |
| | | GALLFDSGETAEATRLKRTARRRYTRRKNRICYLQEIFSNEMAKVDD |
| | | SFFHRLEESFLVEEDKKHERHPIFGNIVDEVAYHEKYPTIYHLRKKLV |
| | | DSTDKADLRLIYLALAHMIKFRGHFLIEGDLNPDNSDVDKLFIQLVQ |
| | | TYNQLFEENPINASGVDAKAILSARLSKSRRLENLIAQLPGEKKNGLF |
| | | GNLIALSLGLTPNFKSNFDLAEDAKLQLSKDTYDDDLDNLLAQIGDQ |
| | | YADLFLAAKNLSDAILLSDILRVNTEITKAPLSASMIKRYDEHHQDLT |
| | | LLKALVRQQLPEKYKEIFFDQSKNGYAGYIDGGASQEEFYKFIKPILE |
| | | KMDGTEELLVKLNREDLLRKQRTFDNGSIPHQIHLGELHAILRRQED |
| | | FYPFLKDNREKIEKILTFRIPYYVGPLARGNSRFAWMTRKSEETITPW |
| | | NFEEVVDKGASAQSFIERMTNFDKNLPNEKVLPKHSLLYEYFTVYNE |
| | | LTKVKYVTEGMRKPAFLSGEQKKAIVDLLFKTNRKVTVKQLKEDYF |
| | | KKIECFDSVEISGVEDRFNASLGTYHDLLKIIKDKDFLDNEENEDILED |
| | | IVLTLTLFEDREMIEERLKTYAHLFDDKVMKQLKRRRYTGWGRLSR |
| | | KLINGIRDKQSGKTILDFLKSDGFANRNFMQLIHDDSLTFKEDIQKAQ |
| | | VSGQGDSLHEHIANLAGSPAIKKGILQTVKVVDELVKVMGRHKPENI |
| | | VIEMARENQTTQKGQKNSRERMKRIEEGIKELGSQILKEHPVENTQL |
| | | QNEKLYLYYLQNGRDMYVDQELDINRLSDYDVDAIVPQSFLKDDSI |
| | | DNKVLTRSDKNRGKSDNVPSEEVVKKMKNYWRQLLNAKLITQRKF |
| | | DNLTKAERGGLSELDKAGFIKRQLVETRQITKHVAQILDSRMNTKYD |
| | | ENDKLIREVKVITLKSKLVSDFRKDFQFYKVREINNYHHAHDAYLNA |
| | | VVGTALIKKYPKLESEFVYGDYKVYDVRKMIAKSEQEIGKATAKYF |
| | | FYSNIMNFFKTEITLANGEIRKRPLIETNGETGEIVWDKGRDFATVRK |
| | | VLSMPQVNIVKKTEVQTGGFSKESILPKRNSDKLIARKKDWDPKKY |
| | | GGFDSPTVAYSVLVVAKVEKGKSKKLKSVKELLGITIMERSSFEKNPI |
| | | DFLEAKGYKEVKKDLIIKLPKYSLFELENGRKRMLASAGELQKGNEL |
| | | ALPSKYVNFLYLASHYEKLKGSPEDNEQKQLFVEQHKHYLDEIIEQIS |
| | | EFSKRVILADANLDKVLSAYNKHRDKPIREQAENIIHLFTLTNLGAPA |
| | | AFKYFDTTIDRKRYTSTKEVLDATLIHQSITGLYETRIDLSQLGGDPK |
| | | KKRKV |
| 1119 | (Hs)DNMT3- | MAAIPALDPEAEPSMDVILVGSSELSSSVSPGTGRDLIAYEVKANQRN |
| | Cas | IEDICICCGSLQVHTQHPLFEGGICAPCKDKFLDALFLYDDDGYQSYC |
| | | SICCSGETLLICGNPDCTRCYCFECVDSLVGPGTSGKVHAMSNWVCY |
| | | LCLPSSRSGLLQRRRKWRSQLKAFYDRESENPLEMFETVPVWRRQP |
| | | VRVLSLFEDIKKELTSLGFLESGSDPGQLKHVVDVTDTVRKDVEEW |
| | | GPFDLVYGATPPLGHTCDRPPSWYLFQFHRLLQYARPKPGSPRPFFW |
| | | MFVDNLVLNKEDLDVASRFLEMEPVTIPDVHGGSLQNAVRVWSNIP |
| | | AIRSSRHWALVSEEELSLLAQNKQSSKLAAKWPTKLVKNCFLPLREY |
| | | FKYFSTELTSSLGGPSSGAPPPSGGSPAGSPTSTEEGTSESATPESGPGT |
| | | STEPSEGSAPGSPAGSPTSTEEGTSTEPSEGSAPGTSTEPSEPKKKRKV |
| | | MDKKYSIGLAIGTNSVGWAVITDEYKVPSKKFKVLGNTDRHSIKKN |
| | | LIGALLFDSGETAEATRLKRTARRRYTRRKNRICYLQEIFSNEMAKV |
| | | DDSFFHRLEESFLVEEDKKHERHPIFGNIVDEVAYHEKYPTIYHLRKK |
| | | LVDSTDKADLRLIYLALAHMIKFRGHFLIEGDLNPDNSDVDKLFIQL |
| | | VQTYNQLFEENPINASGVDAKAILSARLSKSRRLENLIAQLPGEKKN |
| | | GLFGNLIALSLGLTPNFKSNFDLAEDAKLQLSKDTYDDDLDNLLAQI |
| | | GDQYADLFLAAKNLSDAILLSDILRVNTEITKAPLSASMIKRYDEHH |
| | | QDLTLLKALVRQQLPEKYKEIFFDQSKNGYAGYIDGGASQEEFYKFI |
| | | KPILEKMDGTEELLVKLNREDLLRKQRTFDNGSIPHQIHLGELHAILR |
| | | RQEDFYPFLKDNREKIEKILTFRIPYYVGPLARGNSRFAWMTRKSEET |
| | | ITPWNFEEVVDKGASAQSFIERMTNFDKNLPNEKVLPKHSLLYEYFT |
| | | VYNELTKVKYVTEGMRKPAFLSGEQKKAIVDLLFKTNRKVTVKQLK |
| | | EDYFKKIECFDSVEISGVEDRFNASLGTYHDLLKIIKDKDFLDNEENE |
| | | DILEDIVLTLTLFEDREMIEERLKTYAHLFDDKVMKQLKRRRYTGW |
| | | GRLSRKLINGIRDKQSGKTILDFLKSDGFANRNFMQLIHDDSLTFKED |
| | | IQKAQVSGQGDSLHEHIANLAGSPAIKKGILQTVKVVDELVKVMGR |
| | | HKPENIVIEMARENQTTQKGQKNSRERMKRIEEGIKELGSQILKEHPV |
| | | ENTQLQNEKLYLYYLQNGRDMYVDQELDINRLSDYDVDAIVPQSFL |
| | | KDDSIDNKVLTRSDKNRGKSDNVPSEEVVKKMKNYWRQLLNAKLI |
| | | TQRKFDNLTKAERGGLSELDKAGFIKRQLVETRQITKHVAQILDSRM |
| | | NTKYDENDKLIREVKVITLKSKLVSDFRKDFQFYKVREINNYHHAHD |
| | | AYLNAVVGTALIKKYPKLESEFVYGDYKVYDVRKMIAKSEQEIGKA |
| | | TAKYFFYSNIMNFFKTEITLANGEIRKRPLIETNGETGEIVWDKGRDF |
| | | ATVRKVLSMPQVNIVKKTEVQTGGFSKESILPKRNSDKLIARKKDW |
| | | DPKKYGGFDSPTVAYSVLVVAKVEKGKSKKLKSVKELLGITIMERSS |
| | | FEKNPIDFLEAKGYKEVKKDLIIKLPKYSLFELENGRKRMLASAGEL |
| | | QKGNELALPSKYVNFLYLASHYEKLKGSPEDNEQKQLFVEQHKHYL |
| | | DEIIEQISEFSKRVILADANLDKVLSAYNKHRDKPIREQAENIIHLFTLT |
| | | NLGAPAAFKYFDTTIDRKRYTSTKEVLDATLIHQSITGLYETRIDLSQ |
| | | LGGDPKKKRKV |
| 1120 | (Mm)DNMT3L- | MGSRETPSSCSKTLETLDLETSDSSSPDADSPLEEQWLKSSPALKEDS |
| | Cas | VDVVLEDCKEPLSPSSPPTGREMIRYEVKVNRRSIEDICLCCGTLQVY |
| | | TRHPLFEGGLCAPCKDKFLESLFLYDDDGHQSYCTICCSGGTLFICES |
| | | PDCTRCYCFECVDILVGPGTSERINAMACWVCFLCLPFSRSGLLQRR |
| | | KRWRHQLKAFHDQEGAGPMEIYKTVSAWKRQPVRVLSLFRNIDKV |
| | | LKSLGFLESGSGSGGGTLKYVEDVTNVVRRDVEKWGPFDLVYGSTQ |
| | | PLGSSCDRCPGWYMFQFHRILQYALPRQESQRPFFWIFMDNLLLTED |
| | | DQETTTRFLQTEAVTLQDVRGRDYQNAMRVWSNIPGLKSKHAPLTP |
| | | KEEEYLQAQVRSRSKLDAPKVDLLVKNCLLPLREYFKYFSQNSLPLG |
| | | GPSSGAPPPSGGSPAGSPTSTEEGTSESATPESGPGTSTEPSEGSAPGSP |
| | | AGSPTSTEEGTSTEPSEGSAPGTSTEPSEPKKKRKVMDKKYSIGLAIG |
| | | TNSVGWAVITDEYKVPSKKFKVLGNTDRHSIKKNLIGALLFDSGETA |
| | | EATRLKRTARRRYTRRKNRICYLQEIFSNEMAKVDDSFFHRLEESFL |
| | | VEEDKKHERHPIFGNIVDEVAYHEKYPTIYHLRKKLVDSTDKADLRL |
| | | IYLALAHMIKFRGHFLIEGDLNPDNSDVDKLFIQLVQTYNQLFEENPI |
| | | NASGVDAKAILSARLSKSRRLENLIAQLPGEKKNGLFGNLIALSLGLT |
| | | PNFKSNFDLAEDAKLQLSKDTYDDDLDNLLAQIGDQYADLFLAAKN |
| | | LSDAILLSDILRVNTEITKAPLSASMIKRYDEHHQDLTLLKALVRQQL |
| | | PEKYKEIFFDQSKNGYAGYIDGGASQEEFYKFIKPILEKMDGTEELLV |
| | | KLNREDLLRKQRTFDNGSIPHQIHLGELHAILRRQEDFYPFLKDNREK |
| | | IEKILTFRIPYYVGPLARGNSRFAWMTRKSEETITPWNFEEVVDKGAS |
| | | AQSFIERMTNFDKNLPNEKVLPKHSLLYEYFTVYNELTKVKYVTEG |
| | | MRKPAFLSGEQKKAIVDLLFKTNRKVTVKQLKEDYFKKIECFDSVEI |
| | | SGVEDRFNASLGTYHDLLKIIKDKDFLDNEENEDILEDIVLTLTLFED |
| | | REMIEERLKTYAHLFDDKVMKQLKRRRYTGWGRLSRKLINGIRDKQ |
| | | SGKTILDFLKSDGFANRNFMQLIHDDSLTFKEDIQKAQVSGQGDSLH |
| | | EHIANLAGSPAIKKGILQTVKVVDELVKVMGRHKPENIVIEMARENQ |
| | | TTQKGQKNSRERMKRIEEGIKELGSQILKEHPVENTQLQNEKLYLYY |
| | | LQNGRDMYVDQELDINRLSDYDVDAIVPQSFLKDDSIDNKVLTRSD |
| | | KNRGKSDNVPSEEVVKKMKNYWRQLLNAKLITQRKFDNLTKAERG |
| | | GLSELDKAGFIKRQLVETRQITKHVAQILDSRMNTKYDENDKLIREV |
| | | KVITLKSKLVSDFRKDFQFYKVREINNYHHAHDAYLNAVVGTALIK |
| | | KYPKLESEFVYGDYKVYDVRKMIAKSEQEIGKATAKYFFYSNIMNFF |
| | | KTEITLANGEIRKRPLIETNGETGEIVWDKGRDFATVRKVLSMPQVNI |
| | | VKKTEVQTGGFSKESILPKRNSDKLIARKKDWDPKKYGGFDSPTVA |
| | | YSVLVVAKVEKGKSKKLKSVKELLGITIMERSSFEKNPIDFLEAKGY |
| | | KEVKKDLIIKLPKYSLFELENGRKRMLASAGELQKGNELALPSKYVN |
| | | FLYLASHYEKLKGSPEDNEQKQLFVEQHKHYLDEIIEQISEFSKRVIL |
| | | ADANLDKVLSAYNKHRDKPIREQAENIIHLFTLTNLGAPAAFKYFDT |
| | | TIDRKRYTSTKEVLDATLIHQSITGLYETRIDLSQLGGDPKKKRKV |
| 1121 | (Mm)DNMT3C- | MRGGSRHLSNEEDVSGCEDCIIISGTCSDQSSDPKTVPLTQVLEAVCT |
| | Cas | VENRGCRTSSQPSKRKASSLISYVQDLTGDGDEDRDGEVGGSSGSGT |
| | | PVMPQLFCETRIPSKTPAPLSWQANTSASTPWLSPASPYPIIDLTDEDV |
| | | IPQSISTPSVDWSQDSHQEGMDTTQVDAESRDGGNIEYQVSADKLLL |
| | | SQSCILAAFYKLVPYRESIYRTLEKARVRAGKACPSSPGESLEDQLKP |
| | | MLEWAHGGFKPTGIEGLKPNKKQPENKSRRRTTNDPAASESSPPKRL |
| | | KTNSYGGKDRGEDEESREQMASDVTNNKGNLEDHCLSCGRKDPVS |
| | | FHPLFEGGLCQSCRDRFLELFYMYDEDGYQSYCTVCCEGRELLLCSN |
| | | TSCCRCFCVECLEVLVGAGTAEDVKLQEPWSCYMCLPQRCHGVLRR |
| | | RKDWNMRLQDFFTTDPDLEEFEPPKLYPAIPAAKRRPIRVLSLFDGIA |
| | | TGYLVLKELGIKVEKYIASEVCAESIAVGTVKHEGQIKYVDDIRNITK |
| | | EHIDEWGPFDLVIGGSPCNDLSCVNPVRKGLFEGTGRLFFEFYRLLN |
| | | YSCPEEEDDRPFFWMFENVVAMEVGDKRDISRFLECNPVMIDAIKVS |
| | | AAHRARYFWGNLPGMNRPVMASKNDKLELQDCLEFSRTAKLKKVQ |
| | | TITTKSNSIRQGKNQLFPVVMNGKDDVLWCTELERIFGFPEHYTDVS |
| | | NMGRGARQKLLGRSWSVPVIRHLFAPLKDHFACEGGPSSGAPPPSG |
| | | GSPAGSPTSTEEGTSESATPESGPGTSTEPSEGSAPGSPAGSPTSTEEGT |
| | | STEPSEGSAPGTSTEPSEPKKKRKVMDKKYSIGLAIGTNSVGWAVITD |
| | | EYKVPSKKFKVLGNTDRHSIKKNLIGALLFDSGETAEATRLKRTARR |
| | | RYTRRKNRICYLQEIFSNEMAKVDDSFFHRLEESFLVEEDKKHERHPI |
| | | FGNIVDEVAYHEKYPTIYHLRKKLVDSTDKADLRLIYLALAHMIKFR |
| | | GHFLIEGDLNPDNSDVDKLFIQLVQTYNQLFEENPINASGVDAKAILS |
| | | ARLSKSRRLENLIAQLPGEKKNGLFGNLIALSLGLTPNFKSNFDLAED |
| | | AKLQLSKDTYDDDLDNLLAQIGDQYADLFLAAKNLSDAILLSDILRV |
| | | NTEITKAPLSASMIKRYDEHHQDLTLLKALVRQQLPEKYKEIFFDQS |
| | | KNGYAGYIDGGASQEEFYKFIKPILEKMDGTEELLVKLNREDLLRKQ |
| | | RTFDNGSIPHQIHLGELHAILRRQEDFYPFLKDNREKIEKILTFRIPYY |
| | | VGPLARGNSRFAWMTRKSEETITPWNFEEVVDKGASAQSFIERMTN |
| | | FDKNLPNEKVLPKHSLLYEYFTVYNELTKVKYVTEGMRKPAFLSGE |
| | | QKKAIVDLLFKTNRKVTVKQLKEDYFKKIECFDSVEISGVEDRFNAS |
| | | LGTYHDLLKIIKDKDFLDNEENEDILEDIVLTLTLFEDREMIEERLKTY |
| | | AHLFDDKVMKQLKRRRYTGWGRLSRKLINGIRDKQSGKTILDFLKS |
| | | DGFANRNFMQLIHDDSLTFKEDIQKAQVSGQGDSLHEHIANLAGSPA |
| | | IKKGILQTVKVVDELVKVMGRHKPENIVIEMARENQTTQKGQKNSR |
| | | ERMKRIEEGIKELGSQILKEHPVENTQLQNEKLYLYYLQNGRDMYV |
| | | DQELDINRLSDYDVDAIVPQSFLKDDSIDNKVLTRSDKNRGKSDNVP |
| | | SEEVVKKMKNYWRQLLNAKLITQRKFDNLTKAERGGLSELDKAGFI |
| | | KRQLVETRQITKHVAQILDSRMNTKYDENDKLIREVKVITLKSKLVS |
| | | DFRKDFQFYKVREINNYHHAHDAYLNAVVGTALIKKYPKLESEFVY |
| | | GDYKVYDVRKMIAKSEQEIGKATAKYFFYSNIMNFFKTEITLANGEI |
| | | RKRPLIETNGETGEIVWDKGRDFATVRKVLSMPQVNIVKKTEVQTG |
| | | GFSKESILPKRNSDKLIARKKDWDPKKYGGFDSPTVAYSVLVVAKV |
| | | EKGKSKKLKSVKELLGITIMERSSFEKNPIDFLEAKGYKEVKKDLIIK |
| | | LPKYSLFELENGRKRMLASAGELQKGNELALPSKYVNFLYLASHYE |
| | | KLKGSPEDNEQKQLFVEQHKHYLDEIIEQISEFSKRVILADANLDKVL |
| | | SAYNKHRDKPIREQAENIIHLFTLTNLGAPAAFKYFDTTIDRKRYTST |
| | | KEVLDATLIHQSITGLYETRIDLSQLGGDPKKKRKV |
| 1122 | (Mm)DNMT3C | MIRVLSLFDGIATGYLVLKELGIKVEKYIASEVCAESIAVGTVKHEGQ |
| | (CD)-Cas | IKYVDDIRNITKEHIDEWGPFDLVIGGSPCNDLSCVNPVRKGLFEGTG |
| | | RLFFEFYRLLNYSCPEEEDDRPFFWMFENVVAMEVGDKRDISRFLEC |
| | | NPVMIDAIKVSAAHRARYFWGNLPGMNRPVMASKNDKLELQDCLE |
| | | FSRTAKLKKVQTITTKSNSIRQGKNQLFPVVMNGKDDVLWCTELERI |
| | | FGFPEHYTDVSNMGRGARQKLLGRSWSVPVIRHLFAPLKDHFACEG |
| | | GPSSGAPPPSGGSPAGSPTSTEEGTSESATPESGPGTSTEPSEGSAPGSP |
| | | AGSPTSTEEGTSTEPSEGSAPGTSTEPSEPKKKRKVMDKKYSIGLAIG |
| | | TNSVGWAVITDEYKVPSKKFKVLGNTDRHSIKKNLIGALLFDSGETA |
| | | EATRLKRTARRRYTRRKNRICYLQEIFSNEMAKVDDSFFHRLEESFL |
| | | VEEDKKHERHPIFGNIVDEVAYHEKYPTIYHLRKKLVDSTDKADLRL |
| | | IYLALAHMIKFRGHFLIEGDLNPDNSDVDKLFIQLVQTYNQLFEENPI |
| | | NASGVDAKAILSARLSKSRRLENLIAQLPGEKKNGLFGNLIALSLGLT |
| | | PNFKSNFDLAEDAKLQLSKDTYDDDLDNLLAQIGDQYADLFLAAKN |
| | | LSDAILLSDILRVNTEITKAPLSASMIKRYDEHHQDLTLLKALVRQQL |
| | | PEKYKEIFFDQSKNGYAGYIDGGASQEEFYKFIKPILEKMDGTEELLV |
| | | KLNREDLLRKQRTFDNGSIPHQIHLGELHAILRRQEDFYPFLKDNREK |
| | | IEKILTFRIPYYVGPLARGNSRFAWMTRKSEETITPWNFEEVVDKGAS |
| | | AQSFIERMTNFDKNLPNEKVLPKHSLLYEYFTVYNELTKVKYVTEG |
| | | MRKPAFLSGEQKKAIVDLLFKTNRKVTVKQLKEDYFKKIECFDSVEI |
| | | SGVEDRFNASLGTYHDLLKIIKDKDFLDNEENEDILEDIVLTLTLFED |
| | | REMIEERLKTYAHLFDDKVMKQLKRRRYTGWGRLSRKLINGIRDKQ |
| | | SGKTILDFLKSDGFANRNFMQLIHDDSLTFKEDIQKAQVSGQGDSLH |
| | | EHIANLAGSPAIKKGILQTVKVVDELVKVMGRHKPENIVIEMARENQ |
| | | TTQKGQKNSRERMKRIEEGIKELGSQILKEHPVENTQLQNEKLYLYY |
| | | LQNGRDMYVDQELDINRLSDYDVDAIVPQSFLKDDSIDNKVLTRSD |
| | | KNRGKSDNVPSEEVVKKMKNYWRQLLNAKLITQRKFDNLTKAERG |
| | | GLSELDKAGFIKRQLVETRQITKHVAQILDSRMNTKYDENDKLIREV |
| | | KVITLKSKLVSDFRKDFQFYKVREINNYHHAHDAYLNAVVGTALIK |
| | | KYPKLESEFVYGDYKVYDVRKMIAKSEQEIGKATAKYFFYSNIMNFF |
| | | KTEITLANGEIRKRPLIETNGETGEIVWDKGRDFATVRKVLSMPQVNI |
| | | VKKTEVQTGGFSKESILPKRNSDKLIARKKDWDPKKYGGFDSPTVA |
| | | YSVLVVAKVEKGKSKKLKSVKELLGITIMERSSFEKNPIDFLEAKGY |
| | | KEVKKDLIIKLPKYSLFELENGRKRMLASAGELQKGNELALPSKYVN |
| | | FLYLASHYEKLKGSPEDNEQKQLFVEQHKHYLDEIIEQISEFSKRVIL |
| | | ADANLDKVLSAYNKHRDKPIREQAENIIHLFTLTNLGAPAAFKYFDT |
| | | TIDRKRYTSTKEVLDATLIHQSITGLYETRIDLSQLGGDPKKKRKV |
| 1123 | (Mm/Mm) | MIRVLSLFDGIATGYLVLKELGIKVEKYIASEVCAESIAVGTVKHEGQ |
| | DNMT3C(CD)/ | IKYVDDIRNITKEHIDEWGPFDLVIGGSPCNDLSCVNPVRKGLFEGTG |
| | L(CD)-Cas | RLFFEFYRLLNYSCPEEEDDRPFFWMFENVVAMEVGDKRDISRFLEC |
| | | NPVMIDAIKVSAAHRARYFWGNLPGMNRPVMASKNDKLELQDCLE |
| | | FSRTAKLKKVQTITTKSNSIRQGKNQLFPVVMNGKDDVLWCTELERI |
| | | FGFPEHYTDVSNMGRGARQKLLGRSWSVPVIRHLFAPLKDHFACESS |
| | | GNSNANSRGPSFSSGLVPLSLRGSHMGPMEIYKTVSAWKRQPVRVLS |
| | | LFRNIDKVLKSLGFLESGSGSGGGTLKYVEDVTNVVRRDVEKWGPF |
| | | DLVYGSTQPLGSSCDRCPGWYMFQFHRILQYALPRQESQRPFFWIFM |
| | | DNLLLTEDDQETTTRFLQTEAVTLQDVRGRDYQNAMRVWSNIPGLK |
| | | SKHAPLTPKEEEYLQAQVRSRSKLDAPKVDLLVKNCLLPLREYFKYF |
| | | SQNSLPLGGPSSGAPPPSGGSPAGSPTSTEEGTSESATPESGPGTSTEPS |
| | | EGSAPGSPAGSPTSTEEGTSTEPSEGSAPGTSTEPSEPKKKRKVMDKK |
| | | YSIGLAIGTNSVGWAVITDEYKVPSKKFKVLGNTDRHSIKKNLIGALL |
| | | FDSGETAEATRLKRTARRRYTRRKNRICYLQEIFSNEMAKVDDSFFH |
| | | RLEESFLVEEDKKHERHPIFGNIVDEVAYHEKYPTIYHLRKKLVDSTD |
| | | KADLRLIYLALAHMIKFRGHFLIEGDLNPDNSDVDKLFIQLVQTYNQ |
| | | LFEENPINASGVDAKAILSARLSKSRRLENLIAQLPGEKKNGLFGNLI |
| | | ALSLGLTPNFKSNFDLAEDAKLQLSKDTYDDDLDNLLAQIGDQYAD |
| | | LFLAAKNLSDAILLSDILRVNTEITKAPLSASMIKRYDEHHQDLTLLK |
| | | ALVRQQLPEKYKEIFFDQSKNGYAGYIDGGASQEEFYKFIKPILEKM |
| | | DGTEELLVKLNREDLLRKQRTFDNGSIPHQIHLGELHAILRRQEDFYP |
| | | FLKDNREKIEKILTFRIPYYVGPLARGNSRFAWMTRKSEETITPWNFE |
| | | EVVDKGASAQSFIERMTNFDKNLPNEKVLPKHSLLYEYFTVYNELTK |
| | | VKYVTEGMRKPAFLSGEQKKAIVDLLFKTNRKVTVKQLKEDYFKKI |
| | | ECFDSVEISGVEDRFNASLGTYHDLLKIIKDKDFLDNEENEDILEDIVL |
| | | TLTLFEDREMIEERLKTYAHLFDDKVMKQLKRRRYTGWGRLSRKLI |
| | | NGIRDKQSGKTILDFLKSDGFANRNFMQLIHDDSLTFKEDIQKAQVS |
| | | GQGDSLHEHIANLAGSPAIKKGILQTVKVVDELVKVMGRHKPENIVI |
| | | EMARENQTTQKGQKNSRERMKRIEEGIKELGSQILKEHPVENTQLQN |
| | | EKLYLYYLQNGRDMYVDQELDINRLSDYDVDAIVPQSFLKDDSIDN |
| | | KVLTRSDKNRGKSDNVPSEEVVKKMKNYWRQLLNAKLITQRKFDN |
| | | LTKAERGGLSELDKAGFIKRQLVETRQITKHVAQILDSRMNTKYDEN |
| | | DKLIREVKVITLKSKLVSDFRKDFQFYKVREINNYHHAHDAYLNAV |
| | | VGTALIKKYPKLESEFVYGDYKVYDVRKMIAKSEQEIGKATAKYFF |
| | | YSNIMNFFKTEITLANGEIRKRPLIETNGETGEIVWDKGRDFATVRKV |
| | | LSMPQVNIVKKTEVQTGGFSKESILPKRNSDKLIARKKDWDPKKYG |
| | | GFDSPTVAYSVLVVAKVEKGKSKKLKSVKELLGITIMERSSFEKNPID |
| | | FLEAKGYKEVKKDLIIKLPKYSLFELENGRKRMLASAGELQKGNELA |
| | | LPSKYVNFLYLASHYEKLKGSPEDNEQKQLFVEQHKHYLDEIIEQISE |
| | | FSKRVILADANLDKVLSAYNKHRDKPIREQAENIIHLFTLTNLGAPAA |
| | | FKYFDTTIDRKRYTSTKEVLDATLIHQSITGLYETRIDLSQLGGDPKK |
| | | KRKV |
| 1124 | (Mp)M.MpeI- | MNSNKDKIKVIKVFEAFAGIGSQFKALKNIARSKNWEIQHSGMVEW |
| | Cas | FVDAIVSYVAIHSKNFNPKIEQLDKDILSISNDSKMPISEYGIKKINNTI |
| | | KASYLNYAKKHFNNLFDIKKVNKDNFPKNIDIFTYSFPCQDLSVQGL |
| | | QKGIDKELNTRSGLLWEIERILEEIKNSFSKEEMPKYLLMENVKNLLS |
| | | HKNKKNYNTWLKQLEKFGYKSKTYLLNSKNFDNCQNRERVFCLSIR |
| | | DDYLEKTGFKFKELEKVKNPPKKIKDILVDSSNYKYLNLNKYETTTF |
| | | RETKSNIISRSLKNYTTFNSENYVYNINGIGPTLTASGANSRIKIETQQ |
| | | GVRYLTPLECFKYMQFDVNDFKKVQSTNLISENKMIYIAGNSIPVKIL |
| | | EAIFNTLEFVNNEEGGPSSGAPPPSGGSPAGSPTSTEEGTSESATPESG |
| | | PGTSTEPSEGSAPGSPAGSPTSTEEGTSTEPSEGSAPGTSTEPSEPKKK |
| | | RKVMDKKYSIGLAIGTNSVGWAVITDEYKVPSKKFKVLGNTDRHSI |
| | | KKNLIGALLFDSGETAEATRLKRTARRRYTRRKNRICYLQEIFSNEM |
| | | AKVDDSFFHRLEESFLVEEDKKHERHPIFGNIVDEVAYHEKYPTIYHL |
| | | RKKLVDSTDKADLRLIYLALAHMIKFRGHFLIEGDLNPDNSDVDKLF |
| | | IQLVQTYNQLFEENPINASGVDAKAILSARLSKSRRLENLIAQLPGEK |
| | | KNGLFGNLIALSLGLTPNFKSNFDLAEDAKLQLSKDTYDDDLDNLLA |
| | | QIGDQYADLFLAAKNLSDAILLSDILRVNTEITKAPLSASMIKRYDEH |
| | | HQDLTLLKALVRQQLPEKYKEIFFDQSKNGYAGYIDGGASQEEFYKF |
| | | IKPILEKMDGTEELLVKLNREDLLRKQRTFDNGSIPHQIHLGELHAIL |
| | | RRQEDFYPFLKDNREKIEKILTFRIPYYVGPLARGNSRFAWMTRKSEE |
| | | TITPWNFEEVVDKGASAQSFIERMTNFDKNLPNEKVLPKHSLLYEYF |
| | | TVYNELTKVKYVTEGMRKPAFLSGEQKKAIVDLLFKTNRKVTVKQL |
| | | KEDYFKKIECFDSVEISGVEDRFNASLGTYHDLLKIIKDKDFLDNEEN |
| | | EDILEDIVLTLTLFEDREMIEERLKTYAHLFDDKVMKQLKRRRYTGW |
| | | GRLSRKLINGIRDKQSGKTILDFLKSDGFANRNFMQLIHDDSLTFKED |
| | | IQKAQVSGQGDSLHEHIANLAGSPAIKKGILQTVKVVDELVKVMGR |
| | | HKPENIVIEMARENQTTQKGQKNSRERMKRIEEGIKELGSQILKEHPV |
| | | ENTQLQNEKLYLYYLQNGRDMYVDQELDINRLSDYDVDAIVPQSFL |
| | | KDDSIDNKVLTRSDKNRGKSDNVPSEEVVKKMKNYWRQLLNAKLI |
| | | TQRKFDNLTKAERGGLSELDKAGFIKRQLVETRQITKHVAQILDSRM |
| | | NTKYDENDKLIREVKVITLKSKLVSDFRKDFQFYKVREINNYHHAHD |
| | | AYLNAVVGTALIKKYPKLESEFVYGDYKVYDVRKMIAKSEQEIGKA |
| | | TAKYFFYSNIMNFFKTEITLANGEIRKRPLIETNGETGEIVWDKGRDF |
| | | ATVRKVLSMPQVNIVKKTEVQTGGFSKESILPKRNSDKLIARKKDW |
| | | DPKKYGGFDSPTVAYSVLVVAKVEKGKSKKLKSVKELLGITIMERSS |
| | | FEKNPIDFLEAKGYKEVKKDLIIKLPKYSLFELENGRKRMLASAGEL |
| | | QKGNELALPSKYVNFLYLASHYEKLKGSPEDNEQKQLFVEQHKHYL |
| | | DEIIEQISEFSKRVILADANLDKVLSAYNKHRDKPIREQAENIIHLFTLT |
| | | NLGAPAAFKYFDTTIDRKRYTSTKEVLDATLIHQSITGLYETRIDLSQ |
| | | LGGDPKKKRKV |
| 1125 | (Sm)M.SssI- | MSKVENKTKKLRVFEAFAGIGAQRKALEKVRKDEYEIVGLAEWYVP |
| | Cas | AIVMYQAIHNNFHTKLEYKSVSREEMIDYLENKTLSWNSKNPVSNG |
| | | YWKRKKDDELKIIYNAIKLSEKEGNIFDIRDLYKRTLKNIDLLTYSFP |
| | | CQDLSQQGIQKGMKRGSGTRSGLLWEIERALDSTEKNDLPKYLLME |
| | | NVGALLHKKNEEELNQWKQKLESLGYQNSIEVLNAADFGSSQARRR |
| | | VFMISTLNEFVELPKGDKKPKSIKKVLNKIVSEKDILNNLLKYNLTEF |
| | | KKTKSNINKASLIGYSKFNSEGYVYDPEFTGPTLTASGANSRIKIKDG |
| | | SNIRKMNSDETFLYIGFDSQDGKRVNEIEFLTENQKIFVCGNSISVEVL |
| | | EAIIDKIGGGGPSSGAPPPSGGSPAGSPTSTEEGTSESATPESGPGTSTE |
| | | PSEGSAPGSPAGSPTSTEEGTSTEPSEGSAPGTSTEPSEPKKKRKVMD |
| | | KKYSIGLAIGTNSVGWAVITDEYKVPSKKFKVLGNTDRHSIKKNLIG |
| | | ALLFDSGETAEATRLKRTARRRYTRRKNRICYLQEIFSNEMAKVDDS |
| | | FFHRLEESFLVEEDKKHERHPIFGNIVDEVAYHEKYPTIYHLRKKLVD |
| | | STDKADLRLIYLALAHMIKFRGHFLIEGDLNPDNSDVDKLFIQLVQT |
| | | YNQLFEENPINASGVDAKAILSARLSKSRRLENLIAQLPGEKKNGLFG |
| | | NLIALSLGLTPNFKSNFDLAEDAKLQLSKDTYDDDLDNLLAQIGDQY |
| | | ADLFLAAKNLSDAILLSDILRVNTEITKAPLSASMIKRYDEHHQDLTL |
| | | LKALVRQQLPEKYKEIFFDQSKNGYAGYIDGGASQEEFYKFIKPILEK |
| | | MDGTEELLVKLNREDLLRKQRTFDNGSIPHQIHLGELHAILRRQEDF |
| | | YPFLKDNREKIEKILTFRIPYYVGPLARGNSRFAWMTRKSEETITPWN |
| | | FEEVVDKGASAQSFIERMTNFDKNLPNEKVLPKHSLLYEYFTVYNEL |
| | | TKVKYVTEGMRKPAFLSGEQKKAIVDLLFKTNRKVTVKQLKEDYFK |
| | | KIECFDSVEISGVEDRFNASLGTYHDLLKIIKDKDFLDNEENEDILEDI |
| | | VLTLTLFEDREMIEERLKTYAHLFDDKVMKQLKRRRYTGWGRLSRK |
| | | LINGIRDKQSGKTILDFLKSDGFANRNFMQLIHDDSLTFKEDIQKAQV |
| | | SGQGDSLHEHIANLAGSPAIKKGILQTVKVVDELVKVMGRHKPENIV |
| | | IEMARENQTTQKGQKNSRERMKRIEEGIKELGSQILKEHPVENTQLQ |
| | | NEKLYLYYLQNGRDMYVDQELDINRLSDYDVDAIVPQSFLKDDSID |
| | | NKVLTRSDKNRGKSDNVPSEEVVKKMKNYWRQLLNAKLITQRKFD |
| | | NLTKAERGGLSELDKAGFIKRQLVETRQITKHVAQILDSRMNTKYDE |
| | | NDKLIREVKVITLKSKLVSDFRKDFQFYKVREINNYHHAHDAYLNA |
| | | VVGTALIKKYPKLESEFVYGDYKVYDVRKMIAKSEQEIGKATAKYF |
| | | FYSNIMNFFKTEITLANGEIRKRPLIETNGETGEIVWDKGRDFATVRK |
| | | VLSMPQVNIVKKTEVQTGGFSKESILPKRNSDKLIARKKDWDPKKY |
| | | GGFDSPTVAYSVLVVAKVEKGKSKKLKSVKELLGITIMERSSFEKNPI |
| | | DFLEAKGYKEVKKDLIIKLPKYSLFELENGRKRMLASAGELQKGNEL |
| | | ALPSKYVNFLYLASHYEKLKGSPEDNEQKQLFVEQHKHYLDEIIEQIS |
| | | EFSKRVILADANLDKVLSAYNKHRDKPIREQAENIIHLFTLTNLGAPA |
| | | AFKYFDTTIDRKRYTSTKEVLDATLIHQSITGLYETRIDLSQLGGDPK |
| | | KKRKV |
| 1126 | (Hp)M.HpaII- | MKDVLDDNLLEEPAAQYSLFEPESNPNLREKFTFIDLFAGIGGFRIAM |
| | Cas | QNLGGKCIFSSEWDEQAQKTYEANFGDLPYGDITLEETKAFIPEKFDI |
| | | LCAGFPCQAFSIAGKRGGFEDTRGTLFFDVAEIIRRHQPKAFFLENVK |
| | | GLKNHDKGRTLKTILNVLREDLGYFVPEPAIVNAKNFGVPQNRERIY |
| | | IVGFHKSTGVNSFSYPEPLDKIVTFADIREEKTVPTKYYLSTQYIDTLR |
| | | KHKERHESKGNGFGYEIIPDDGIANAIVVGGMGRERNLVIDHRITDFT |
| | | PTTNIKGEVNREGIRKMTPREWARLQGFPDSYVIPVSDASAYKQFGN |
| | | SVAVPAIQATGKKILEKLGNLYDGGPSSGAPPPSGGSPAGSPTSTEEG |
| | | TSESATPESGPGTSTEPSEGSAPGSPAGSPTSTEEGTSTEPSEGSAPGTS |
| | | TEPSEPKKKRKVMDKKYSIGLAIGTNSVGWAVITDEYKVPSKKFKVL |
| | | GNTDRHSIKKNLIGALLFDSGETAEATRLKRTARRRYTRRKNRICYL |
| | | QEIFSNEMAKVDDSFFHRLEESFLVEEDKKHERHPIFGNIVDEVAYHE |
| | | KYPTIYHLRKKLVDSTDKADLRLIYLALAHMIKFRGHFLIEGDLNPD |
| | | NSDVDKLFIQLVQTYNQLFEENPINASGVDAKAILSARLSKSRRLENL |
| | | IAQLPGEKKNGLFGNLIALSLGLTPNFKSNFDLAEDAKLQLSKDTYD |
| | | DDLDNLLAQIGDQYADLFLAAKNLSDAILLSDILRVNTEITKAPLSAS |
| | | MIKRYDEHHQDLTLLKALVRQQLPEKYKEIFFDQSKNGYAGYIDGG |
| | | ASQEEFYKFIKPILEKMDGTEELLVKLNREDLLRKQRTFDNGSIPHQI |
| | | HLGELHAILRRQEDFYPFLKDNREKIEKILTFRIPYYVGPLARGNSRF |
| | | AWMTRKSEETITPWNFEEVVDKGASAQSFIERMTNFDKNLPNEKVL |
| | | PKHSLLYEYFTVYNELTKVKYVTEGMRKPAFLSGEQKKAIVDLLFK |
| | | TNRKVTVKQLKEDYFKKIECFDSVEISGVEDRFNASLGTYHDLLKIIK |
| | | DKDFLDNEENEDILEDIVLTLTLFEDREMIEERLKTYAHLFDDKVMK |
| | | QLKRRRYTGWGRLSRKLINGIRDKQSGKTILDFLKSDGFANRNFMQL |
| | | IHDDSLTFKEDIQKAQVSGQGDSLHEHIANLAGSPAIKKGILQTVKVV |
| | | DELVKVMGRHKPENIVIEMARENQTTQKGQKNSRERMKRIEEGIKE |
| | | LGSQILKEHPVENTQLQNEKLYLYYLQNGRDMYVDQELDINRLSDY |
| | | DVDAIVPQSFLKDDSIDNKVLTRSDKNRGKSDNVPSEEVVKKMKNY |
| | | WRQLLNAKLITQRKFDNLTKAERGGLSELDKAGFIKRQLVETRQITK |
| | | HVAQILDSRMNTKYDENDKLIREVKVITLKSKLVSDFRKDFQFYKVR |
| | | EINNYHHAHDAYLNAVVGTALIKKYPKLESEFVYGDYKVYDVRKMI |
| | | AKSEQEIGKATAKYFFYSNIMNFFKTEITLANGEIRKRPLIETNGETGE |
| | | IVWDKGRDFATVRKVLSMPQVNIVKKTEVQTGGFSKESILPKRNSDK |
| | | LIARKKDWDPKKYGGFDSPTVAYSVLVVAKVEKGKSKKLKSVKEL |
| | | LGITIMERSSFEKNPIDFLEAKGYKEVKKDLIIKLPKYSLFELENGRKR |
| | | MLASAGELQKGNELALPSKYVNFLYLASHYEKLKGSPEDNEQKQLF |
| | | VEQHKHYLDEIIEQISEFSKRVILADANLDKVLSAYNKHRDKPIREQA |
| | | ENIIHLFTLTNLGAPAAFKYFDTTIDRKRYTSTKEVLDATLIHQSITGL |
| | | YETRIDLSQLGGDPKKKRKV |
| 1127 | (Al)M.AluI- | MSKANAKYSFVDLFAGIGGFHAALAATGGVCEYAVEIDREAAAVYE |
| | Cas | RNWNKPALGDITDDANDEGVTLRGYDGPIDVLTGGFPCQPFSKSGA |
| | | QHGMAETRGTLFWNIARIIEEREPTVLILENVRNLVGPRHRHEWLTII |
| | | ETLRFFGYEVSGAPAIFSPHLLPAWMGGTPQVRERVFITATLVPERM |
| | | RDERIPRTETGEIDAEAIGPKPVATMNDRFPIKKGGTELFHPGDRKSG |
| | | WNLLTSGIIREGDPEPSNVDLRLTETETLWIDAWDDLESTIRRATGRP |
| | | LEGFPYWADSWTDFRELSRLVVIRGFQAPEREVVGDRKRYVARTDM |
| | | PEGFVPASVTRPAIDETLPAWKQSHLRRNYDFFERHFAEVVAWAYR |
| | | WGVYTDLFPASRRKLEWQAQDAPRLWDTVMHFRPSGIRAKRPTYL |
| | | PALVAITQTSIVGPLERRLSPRETARLQGLPEWFDFGEQRAAATYKQ |
| | | MGNGVNVGVVRHILREHVRRDRALLKLTPAGQRIINAVLADEPDAT |
| | | VGALGAAEGGPSSGAPPPSGGSPAGSPTSTEEGTSESATPESGPGTST |
| | | EPSEGSAPGSPAGSPTSTEEGTSTEPSEGSAPGTSTEPSEPKKKRKVM |
| | | DKKYSIGLAIGTNSVGWAVITDEYKVPSKKFKVLGNTDRHSIKKNLI |
| | | GALLFDSGETAEATRLKRTARRRYTRRKNRICYLQEIFSNEMAKVDD |
| | | SFFHRLEESFLVEEDKKHERHPIFGNIVDEVAYHEKYPTIYHLRKKLV |
| | | DSTDKADLRLIYLALAHMIKFRGHFLIEGDLNPDNSDVDKLFIQLVQ |
| | | TYNQLFEENPINASGVDAKAILSARLSKSRRLENLIAQLPGEKKNGLF |
| | | GNLIALSLGLTPNFKSNFDLAEDAKLQLSKDTYDDDLDNLLAQIGDQ |
| | | YADLFLAAKNLSDAILLSDILRVNTEITKAPLSASMIKRYDEHHQDLT |
| | | LLKALVRQQLPEKYKEIFFDQSKNGYAGYIDGGASQEEFYKFIKPILE |
| | | KMDGTEELLVKLNREDLLRKQRTFDNGSIPHQIHLGELHAILRRQED |
| | | FYPFLKDNREKIEKILTFRIPYYVGPLARGNSRFAWMTRKSEETITPW |
| | | NFEEVVDKGASAQSFIERMTNFDKNLPNEKVLPKHSLLYEYFTVYNE |
| | | LTKVKYVTEGMRKPAFLSGEQKKAIVDLLFKTNRKVTVKQLKEDYF |
| | | KKIECFDSVEISGVEDRFNASLGTYHDLLKIIKDKDFLDNEENEDILED |
| | | IVLTLTLFEDREMIEERLKTYAHLFDDKVMKQLKRRRYTGWGRLSR |
| | | KLINGIRDKQSGKTILDFLKSDGFANRNFMQLIHDDSLTFKEDIQKAQ |
| | | VSGQGDSLHEHIANLAGSPAIKKGILQTVKVVDELVKVMGRHKPENI |
| | | VIEMARENQTTQKGQKNSRERMKRIEEGIKELGSQILKEHPVENTQL |
| | | QNEKLYLYYLQNGRDMYVDQELDINRLSDYDVDAIVPQSFLKDDSI |
| | | DNKVLTRSDKNRGKSDNVPSEEVVKKMKNYWRQLLNAKLITQRKF |
| | | DNLTKAERGGLSELDKAGFIKRQLVETRQITKHVAQILDSRMNTKYD |
| | | ENDKLIREVKVITLKSKLVSDFRKDFQFYKVREINNYHHAHDAYLNA |
| | | VVGTALIKKYPKLESEFVYGDYKVYDVRKMIAKSEQEIGKATAKYF |
| | | FYSNIMNFFKTEITLANGEIRKRPLIETNGETGEIVWDKGRDFATVRK |
| | | VLSMPQVNIVKKTEVQTGGFSKESILPKRNSDKLIARKKDWDPKKY |
| | | GGFDSPTVAYSVLVVAKVEKGKSKKLKSVKELLGITIMERSSFEKNPI |
| | | DFLEAKGYKEVKKDLIIKLPKYSLFELENGRKRMLASAGELQKGNEL |
| | | ALPSKYVNFLYLASHYEKLKGSPEDNEQKQLFVEQHKHYLDEIIEQIS |
| | | EFSKRVILADANLDKVLSAYNKHRDKPIREQAENIIHLFTLTNLGAPA |
| | | AFKYFDTTIDRKRYTSTKEVLDATLIHQSITGLYETRIDLSQLGGDPK |
| | | KKRKV |
| 1128 | (Al)M.AluI- | MSKANAKYSFVDLFAGIGGFHAALAATGGVCEYAVEIDREAAAVYE |
| | de182-Cas | RNWNKPALGDITDDANDEGVTLRGYDGPIDVLTGGFPCQPFSKSGA |
| | | QHGMAETRGTLFWNIARIIEEREPTVLILENVRNLVGPRHRHEWLTII |
| | | ETLRFFGYEVSGAPAIFSPHLLPAWMGGTPQVRERVFITATLVPERM |
| | | RDERSTIRRATGRPLEGFPYWADSWTDFRELSRLVVIRGFQAPEREV |
| | | VGDRKRYVARTDMPEGFVPASVTRPAIDETLPAWKQSHLRRNYDFF |
| | | ERHFAEVVAWAYRWGVYTDLFPASRRKLEWQAQDAPRLWDTVMH |
| | | FRPSGIRAKRPTYLPALVAITQTSIVGPLERRLSPRETARLQGLPEWFD |
| | | FGEQRAAATYKQMGNGVNVGVVRHILREHVRRDRALLKLTPAGQR |
| | | IINAVLADEPDATVGALGAAEGGPSSGAPPPSGGSPAGSPTSTEEGTS |
| | | ESATPESGPGTSTEPSEGSAPGSPAGSPTSTEEGTSTEPSEGSAPGTSTE |
| | | PSEPKKKRKVMDKKYSIGLAIGTNSVGWAVITDEYKVPSKKFKVLG |
| | | NTDRHSIKKNLIGALLFDSGETAEATRLKRTARRRYTRRKNRICYLQ |
| | | EIFSNEMAKVDDSFFHRLEESFLVEEDKKHERHPIFGNIVDEVAYHEK |
| | | YPTIYHLRKKLVDSTDKADLRLIYLALAHMIKFRGHFLIEGDLNPDNS |
| | | DVDKLFIQLVQTYNQLFEENPINASGVDAKAILSARLSKSRRLENLIA |
| | | QLPGEKKNGLFGNLIALSLGLTPNFKSNFDLAEDAKLQLSKDTYDDD |
| | | LDNLLAQIGDQYADLFLAAKNLSDAILLSDILRVNTEITKAPLSASMI |
| | | KRYDEHHQDLTLLKALVRQQLPEKYKEIFFDQSKNGYAGYIDGGAS |
| | | QEEFYKFIKPILEKMDGTEELLVKLNREDLLRKQRTFDNGSIPHQIHL |
| | | GELHAILRRQEDFYPFLKDNREKIEKILTFRIPYYVGPLARGNSRFAW |
| | | MTRKSEETITPWNFEEVVDKGASAQSFIERMTNFDKNLPNEKVLPKH |
| | | SLLYEYFTVYNELTKVKYVTEGMRKPAFLSGEQKKAIVDLLFKTNR |
| | | KVTVKQLKEDYFKKIECFDSVEISGVEDRFNASLGTYHDLLKIIKDKD |
| | | FLDNEENEDILEDIVLTLTLFEDREMIEERLKTYAHLFDDKVMKQLK |
| | | RRRYTGWGRLSRKLINGIRDKQSGKTILDFLKSDGFANRNFMQLIHD |
| | | DSLTFKEDIQKAQVSGQGDSLHEHIANLAGSPAIKKGILQTVKVVDE |
| | | LVKVMGRHKPENIVIEMARENQTTQKGQKNSRERMKRIEEGIKELGS |
| | | QILKEHPVENTQLQNEKLYLYYLQNGRDMYVDQELDINRLSDYDVD |
| | | AIVPQSFLKDDSIDNKVLTRSDKNRGKSDNVPSEEVVKKMKNYWRQ |
| | | LLNAKLITQRKFDNLTKAERGGLSELDKAGFIKRQLVETRQITKHVA |
| | | QILDSRMNTKYDENDKLIREVKVITLKSKLVSDFRKDFQFYKVREIN |
| | | NYHHAHDAYLNAVVGTALIKKYPKLESEFVYGDYKVYDVRKMIAK |
| | | SEQEIGKATAKYFFYSNIMNFFKTEITLANGEIRKRPLIETNGETGEIV |
| | | WDKGRDFATVRKVLSMPQVNIVKKTEVQTGGFSKESILPKRNSDKLI |
| | | ARKKDWDPKKYGGFDSPTVAYSVLVVAKVEKGKSKKLKSVKELLG |
| | | ITIMERSSFEKNPIDFLEAKGYKEVKKDLIIKLPKYSLFELENGRKRML |
| | | ASAGELQKGNELALPSKYVNFLYLASHYEKLKGSPEDNEQKQLFVE |
| | | QHKHYLDEIIEQISEFSKRVILADANLDKVLSAYNKHRDKPIREQAEN |
| | | IIHLFTLTNLGAPAAFKYFDTTIDRKRYTSTKEVLDATLIHQSITGLYE |
| | | TRIDLSQLGGDPKKKRKV |
| 1129 | (Ha) | MNLISLFSGAGGLDLGFQKAGFRIICANEYDKSIWKTYESNHSAKLIK |
| | M.HaeIII- | GDISKISSDEFPKCDGIIGGPPCQSWSEGGSLRGIDDPRGKLFYEYIRIL |
| | Cas | KQKKPIFFLAENVKGMMAQRHNKAVQEFIQEFDNAGYDVHIILLNA |
| | | NDYGVAQDRKRVFYIGFRKELNINYLPPIPHLIKPTFKDVIWDLKDNP |
| | | IPALDKNKTNGNKCIYPNHEYFIGSYSTIFMSRNRVRQWNEPAFTVQ |
| | | ASGRQCQLHPQAPVMLKVSKNLNKFVEGKEHLYRRLTVRECARVQ |
| | | GFPDDFIFHYESLNDGYKMIGNAVPVNLAYEIAKTIKSALEICKGNGG |
| | | PSSGAPPPSGGSPAGSPTSTEEGTSESATPESGPGTSTEPSEGSAPGSPA |
| | | GSPTSTEEGTSTEPSEGSAPGTSTEPSEPKKKRKVMDKKYSIGLAIGT |
| | | NSVGWAVITDEYKVPSKKFKVLGNTDRHSIKKNLIGALLFDSGETAE |
| | | ATRLKRTARRRYTRRKNRICYLQEIFSNEMAKVDDSFFHRLEESFLV |
| | | EEDKKHERHPIFGNIVDEVAYHEKYPTIYHLRKKLVDSTDKADLRLI |
| | | YLALAHMIKFRGHFLIEGDLNPDNSDVDKLFIQLVQTYNQLFEENPIN |
| | | ASGVDAKAILSARLSKSRRLENLIAQLPGEKKNGLFGNLIALSLGLTP |
| | | NFKSNFDLAEDAKLQLSKDTYDDDLDNLLAQIGDQYADLFLAAKNL |
| | | SDAILLSDILRVNTEITKAPLSASMIKRYDEHHQDLTLLKALVRQQLP |
| | | EKYKEIFFDQSKNGYAGYIDGGASQEEFYKFIKPILEKMDGTEELLVK |
| | | LNREDLLRKQRTFDNGSIPHQIHLGELHAILRRQEDFYPFLKDNREKI |
| | | EKILTFRIPYYVGPLARGNSRFAWMTRKSEETITPWNFEEVVDKGAS |
| | | AQSFIERMTNFDKNLPNEKVLPKHSLLYEYFTVYNELTKVKYVTEG |
| | | MRKPAFLSGEQKKAIVDLLFKTNRKVTVKQLKEDYFKKIECFDSVEI |
| | | SGVEDRFNASLGTYHDLLKIIKDKDFLDNEENEDILEDIVLTLTLFED |
| | | REMIEERLKTYAHLFDDKVMKQLKRRRYTGWGRLSRKLINGIRDKQ |
| | | SGKTILDFLKSDGFANRNFMQLIHDDSLTFKEDIQKAQVSGQGDSLH |
| | | EHIANLAGSPAIKKGILQTVKVVDELVKVMGRHKPENIVIEMARENQ |
| | | TTQKGQKNSRERMKRIEEGIKELGSQILKEHPVENTQLQNEKLYLYY |
| | | LQNGRDMYVDQELDINRLSDYDVDAIVPQSFLKDDSIDNKVLTRSD |
| | | KNRGKSDNVPSEEVVKKMKNYWRQLLNAKLITQRKFDNLTKAERG |
| | | GLSELDKAGFIKRQLVETRQITKHVAQILDSRMNTKYDENDKLIREV |
| | | KVITLKSKLVSDFRKDFQFYKVREINNYHHAHDAYLNAVVGTALIK |
| | | KYPKLESEFVYGDYKVYDVRKMIAKSEQEIGKATAKYFFYSNIMNFF |
| | | KTEITLANGEIRKRPLIETNGETGEIVWDKGRDFATVRKVLSMPQVNI |
| | | VKKTEVQTGGFSKESILPKRNSDKLIARKKDWDPKKYGGFDSPTVA |
| | | YSVLVVAKVEKGKSKKLKSVKELLGITIMERSSFEKNPIDFLEAKGY |
| | | KEVKKDLIIKLPKYSLFELENGRKRMLASAGELQKGNELALPSKYVN |
| | | FLYLASHYEKLKGSPEDNEQKQLFVEQHKHYLDEIIEQISEFSKRVIL |
| | | ADANLDKVLSAYNKHRDKPIREQAENIIHLFTLTNLGAPAAFKYFDT |
| | | TIDRKRYTSTKEVLDATLIHQSITGLYETRIDLSQLGGDPKKKRKV |
| 1130 | (Ha) | MNLISLFSGAGGLDLGFQKAGFRIICANEYDKSIWKTYESNHSAKLIK |
| | M.HaeIII- | GDISKISSDEFPKCDGIIGGPPCQSWSEGGSLRGIDDPRGKLFYEYIRIL |
| | T29-Cas | KQKKPIFFLAENVKGMMAQRHNKAVQEFIQEFDNAGYDVHIILLNA |
| | | NDYGVAQDRKRVFYIGFRKELNINYLPPIPHLIKPTFKDVIWDLKDNP |
| | | IPALDKNKTNGNKCIYPNHEYFIGSYSTIFMSANRVRQWNEPAFTVQ |
| | | ASGRQCQLHPQAPVMLKVSKLMWKFVEGKEHLYRRLTVRECARVQ |
| | | GFPDDFIFHYESLNDGYKMIGNAVPVNLAYEIAKTIKSALEICKGNGG |
| | | PSSGAPPPSGGSPAGSPTSTEEGTSESATPESGPGTSTEPSEGSAPGSPA |
| | | GSPTSTEEGTSTEPSEGSAPGTSTEPSEPKKKRKVMDKKYSIGLAIGT |
| | | NSVGWAVITDEYKVPSKKFKVLGNTDRHSIKKNLIGALLFDSGETAE |
| | | ATRLKRTARRRYTRRKNRICYLQEIFSNEMAKVDDSFFHRLEESFLV |
| | | EEDKKHERHPIFGNIVDEVAYHEKYPTIYHLRKKLVDSTDKADLRLI |
| | | YLALAHMIKFRGHFLIEGDLNPDNSDVDKLFIQLVQTYNQLFEENPIN |
| | | ASGVDAKAILSARLSKSRRLENLIAQLPGEKKNGLFGNLIALSLGLTP |
| | | NFKSNFDLAEDAKLQLSKDTYDDDLDNLLAQIGDQYADLFLAAKNL |
| | | SDAILLSDILRVNTEITKAPLSASMIKRYDEHHQDLTLLKALVRQQLP |
| | | EKYKEIFFDQSKNGYAGYIDGGASQEEFYKFIKPILEKMDGTEELLVK |
| | | LNREDLLRKQRTFDNGSIPHQIHLGELHAILRRQEDFYPFLKDNREKI |
| | | EKILTFRIPYYVGPLARGNSRFAWMTRKSEETITPWNFEEVVDKGAS |
| | | AQSFIERMTNFDKNLPNEKVLPKHSLLYEYFTVYNELTKVKYVTEG |
| | | MRKPAFLSGEQKKAIVDLLFKTNRKVTVKQLKEDYFKKIECFDSVEI |
| | | SGVEDRFNASLGTYHDLLKIIKDKDFLDNEENEDILEDIVLTLTLFED |
| | | REMIEERLKTYAHLFDDKVMKQLKRRRYTGWGRLSRKLINGIRDKQ |
| | | SGKTILDFLKSDGFANRNFMQLIHDDSLTFKEDIQKAQVSGQGDSLH |
| | | EHIANLAGSPAIKKGILQTVKVVDELVKVMGRHKPENIVIEMARENQ |
| | | TTQKGQKNSRERMKRIEEGIKELGSQILKEHPVENTQLQNEKLYLYY |
| | | LQNGRDMYVDQELDINRLSDYDVDAIVPQSFLKDDSIDNKVLTRSD |
| | | KNRGKSDNVPSEEVVKKMKNYWRQLLNAKLITQRKFDNLTKAERG |
| | | GLSELDKAGFIKRQLVETRQITKHVAQILDSRMNTKYDENDKLIREV |
| | | KVITLKSKLVSDFRKDFQFYKVREINNYHHAHDAYLNAVVGTALIK |
| | | KYPKLESEFVYGDYKVYDVRKMIAKSEQEIGKATAKYFFYSNIMNFF |
| | | KTEITLANGEIRKRPLIETNGETGEIVWDKGRDFATVRKVLSMPQVNI |
| | | VKKTEVQTGGFSKESILPKRNSDKLIARKKDWDPKKYGGFDSPTVA |
| | | YSVLVVAKVEKGKSKKLKSVKELLGITIMERSSFEKNPIDFLEAKGY |
| | | KEVKKDLIIKLPKYSLFELENGRKRMLASAGELQKGNELALPSKYVN |
| | | FLYLASHYEKLKGSPEDNEQKQLFVEQHKHYLDEIIEQISEFSKRVIL |
| | | ADANLDKVLSAYNKHRDKPIREQAENIIHLFTLTNLGAPAAFKYFDT |
| | | TIDRKRYTSTKEVLDATLIHQSITGLYETRIDLSQLGGDPKKKRKV |
| 1131 | (Hh)M.HhaI- | MIEIKDKQLTGLRFIDLFAGLGGFRLALESCGAECVYSNEWDKYAQE |
| | Cas | VYEMNFGEKPEGDITQVNEKTIPDHDILCAGFPCQAFSISGKQKGFED |
| | | SRGTLFFDIARIVREKKPKVVFMENVKNFASHDNGNTLEVVKNTMN |
| | | ELDYSFHAKVLNALDYGIPQKRERIYMICFRNDLNIQNFQFPKPFELN |
| | | TFVKDLLLPDSEVEHLVIDRKDLVMTNQEIEQTTPKTVRLGIVGKGG |
| | | QGERIYSTRGIAITLSAYGGGIFAKTGGYLVNGKTRKLHPRECARVM |
| | | GYPDSYKVHPSTSQAYKQFGNSVVINVLQYIAYNIGSSLNFKPYGGP |
| | | SSGAPPPSGGSPAGSPTSTEEGTSESATPESGPGTSTEPSEGSAPGSPA |
| | | GSPTSTEEGTSTEPSEGSAPGTSTEPSEPKKKRKVMDKKYSIGLAIGT |
| | | NSVGWAVITDEYKVPSKKFKVLGNTDRHSIKKNLIGALLFDSGETAE |
| | | ATRLKRTARRRYTRRKNRICYLQEIFSNEMAKVDDSFFHRLEESFLV |
| | | EEDKKHERHPIFGNIVDEVAYHEKYPTIYHLRKKLVDSTDKADLRLI |
| | | YLALAHMIKFRGHFLIEGDLNPDNSDVDKLFIQLVQTYNQLFEENPIN |
| | | ASGVDAKAILSARLSKSRRLENLIAQLPGEKKNGLFGNLIALSLGLTP |
| | | NFKSNFDLAEDAKLQLSKDTYDDDLDNLLAQIGDQYADLFLAAKNL |
| | | SDAILLSDILRVNTEITKAPLSASMIKRYDEHHQDLTLLKALVRQQLP |
| | | EKYKEIFFDQSKNGYAGYIDGGASQEEFYKFIKPILEKMDGTEELLVK |
| | | LNREDLLRKQRTFDNGSIPHQIHLGELHAILRRQEDFYPFLKDNREKI |
| | | EKILTFRIPYYVGPLARGNSRFAWMTRKSEETITPWNFEEVVDKGAS |
| | | AQSFIERMTNFDKNLPNEKVLPKHSLLYEYFTVYNELTKVKYVTEG |
| | | MRKPAFLSGEQKKAIVDLLFKTNRKVTVKQLKEDYFKKIECFDSVEI |
| | | SGVEDRFNASLGTYHDLLKIIKDKDFLDNEENEDILEDIVLTLTLFED |
| | | REMIEERLKTYAHLFDDKVMKQLKRRRYTGWGRLSRKLINGIRDKQ |
| | | SGKTILDFLKSDGFANRNFMQLIHDDSLTFKEDIQKAQVSGQGDSLH |
| | | EHIANLAGSPAIKKGILQTVKVVDELVKVMGRHKPENIVIEMARENQ |
| | | TTQKGQKNSRERMKRIEEGIKELGSQILKEHPVENTQLQNEKLYLYY |
| | | LQNGRDMYVDQELDINRLSDYDVDAIVPQSFLKDDSIDNKVLTRSD |
| | | KNRGKSDNVPSEEVVKKMKNYWRQLLNAKLITQRKFDNLTKAERG |
| | | GLSELDKAGFIKRQLVETRQITKHVAQILDSRMNTKYDENDKLIREV |
| | | KVITLKSKLVSDFRKDFQFYKVREINNYHHAHDAYLNAVVGTALIK |
| | | KYPKLESEFVYGDYKVYDVRKMIAKSEQEIGKATAKYFFYSNIMNFF |
| | | KTEITLANGEIRKRPLIETNGETGEIVWDKGRDFATVRKVLSMPQVNI |
| | | VKKTEVQTGGFSKESILPKRNSDKLIARKKDWDPKKYGGFDSPTVA |
| | | YSVLVVAKVEKGKSKKLKSVKELLGITIMERSSFEKNPIDFLEAKGY |
| | | KEVKKDLIIKLPKYSLFELENGRKRMLASAGELQKGNELALPSKYVN |
| | | FLYLASHYEKLKGSPEDNEQKQLFVEQHKHYLDEIIEQISEFSKRVIL |
| | | ADANLDKVLSAYNKHRDKPIREQAENIIHLFTLTNLGAPAAFKYFDT |
| | | TIDRKRYTSTKEVLDATLIHQSITGLYETRIDLSQLGGDPKKKRKV |
| 1132 | (Ms)M.MspI- | MKPEILKLIRSKLDLTQKQASEIIEVSDKTWQQWESGKTEMHPAYYS |
| | Cas | FLQEKLKDKINFEELSAQKTLQKKIFDKYNQNQITKNAEELAEITHIE |
| | | ERKDAYSSDFKFIDLFSGIGGIRQSFEVNGGKCVFSSEIDPFAKFTYYT |
| | | NFGVVPFGDITKVEATTIPQHDILCAGFPCQPFSHIGKREGFEHPTQGT |
| | | MFHEIVRIIETKKTPVLFLENVPGLINHDDGNTLKVIIETLEDMGYKV |
| | | HHTVLDASHFGIPQKRKRFYLVAFLNQNIHFEFPKPPMISKDIGEVLE |
| | | SDVTGYSISEHLQKSYLFKKDDGKPSLIDKNTTGAVKTLVSTYHKIQ |
| | | RLTGTFVKDGETGIRLLTTNECKAIMGFPKDFVIPVSRTQMYRQMGN |
| | | SVVVPVVTKIAEQISLALKTVNQQSPQENFELELVGGPSSGAPPPSGG |
| | | SPAGSPTSTEEGTSESATPESGPGTSTEPSEGSAPGSPAGSPTSTEEGTS |
| | | TEPSEGSAPGTSTEPSEPKKKRKVMDKKYSIGLAIGTNSVGWAVITD |
| | | EYKVPSKKFKVLGNTDRHSIKKNLIGALLFDSGETAEATRLKRTARR |
| | | RYTRRKNRICYLQEIFSNEMAKVDDSFFHRLEESFLVEEDKKHERHPI |
| | | FGNIVDEVAYHEKYPTIYHLRKKLVDSTDKADLRLIYLALAHMIKFR |
| | | GHFLIEGDLNPDNSDVDKLFIQLVQTYNQLFEENPINASGVDAKAILS |
| | | ARLSKSRRLENLIAQLPGEKKNGLFGNLIALSLGLTPNFKSNFDLAED |
| | | AKLQLSKDTYDDDLDNLLAQIGDQYADLFLAAKNLSDAILLSDILRV |
| | | NTEITKAPLSASMIKRYDEHHQDLTLLKALVRQQLPEKYKEIFFDQS |
| | | KNGYAGYIDGGASQEEFYKFIKPILEKMDGTEELLVKLNREDLLRKQ |
| | | RTFDNGSIPHQIHLGELHAILRRQEDFYPFLKDNREKIEKILTFRIPYY |
| | | VGPLARGNSRFAWMTRKSEETITPWNFEEVVDKGASAQSFIERMTN |
| | | FDKNLPNEKVLPKHSLLYEYFTVYNELTKVKYVTEGMRKPAFLSGE |
| | | QKKAIVDLLFKTNRKVTVKQLKEDYFKKIECFDSVEISGVEDRFNAS |
| | | LGTYHDLLKIIKDKDFLDNEENEDILEDIVLTLTLFEDREMIEERLKTY |
| | | AHLFDDKVMKQLKRRRYTGWGRLSRKLINGIRDKQSGKTILDFLKS |
| | | DGFANRNFMQLIHDDSLTFKEDIQKAQVSGQGDSLHEHIANLAGSPA |
| | | IKKGILQTVKVVDELVKVMGRHKPENIVIEMARENQTTQKGQKNSR |
| | | ERMKRIEEGIKELGSQILKEHPVENTQLQNEKLYLYYLQNGRDMYV |
| | | DQELDINRLSDYDVDAIVPQSFLKDDSIDNKVLTRSDKNRGKSDNVP |
| | | SEEVVKKMKNYWRQLLNAKLITQRKFDNLTKAERGGLSELDKAGFI |
| | | KRQLVETRQITKHVAQILDSRMNTKYDENDKLIREVKVITLKSKLVS |
| | | DFRKDFQFYKVREINNYHHAHDAYLNAVVGTALIKKYPKLESEFVY |
| | | GDYKVYDVRKMIAKSEQEIGKATAKYFFYSNIMNFFKTEITLANGEI |
| | | RKRPLIETNGETGEIVWDKGRDFATVRKVLSMPQVNIVKKTEVQTG |
| | | GFSKESILPKRNSDKLIARKKDWDPKKYGGFDSPTVAYSVLVVAKV |
| | | EKGKSKKLKSVKELLGITIMERSSFEKNPIDFLEAKGYKEVKKDLIIK |
| | | LPKYSLFELENGRKRMLASAGELQKGNELALPSKYVNFLYLASHYE |
| | | KLKGSPEDNEQKQLFVEQHKHYLDEIIEQISEFSKRVILADANLDKVL |
| | | SAYNKHRDKPIREQAENIIHLFTLTNLGAPAAFKYFDTTIDRKRYTST |
| | | KEVLDATLIHQSITGLYETRIDLSQLGGDPKKKRKV |
| 1133 | (Ai)Masc1- | MSERRYEAGMTVALHEGSFLKIQRVYIRQYHADNRREHMLVGPLFR |
| | Cas | RTKYLKALSKKVNEVAIVHESIHVPVQDVIGVRELIITNRPFPECRKG |
| | | DEHTGRLVCRWVYNLDERAKGREYKKQRYIRRITEAEADPEYRVED |
| | | RVLRRRWFQEGYIGDEISYKEHGNGDIVDIRSESPLQVLDGWGGDLV |
| | | DLENGEETSIPGPCRSASSYGRLMKPPLAQAADSNTSRKYTFGDTFC |
| | | GGGGVSLGARQAGLEVKWAFDMNPNAGANYRRNFPNTDFFLAEAE |
| | | QFIQLSVGISQHVDILHLSPPCQTFSRAHTIAGKNDENNEASFFAVVN |
| | | LIKAVRPRLFTVEETDGIMDRQSRQFIDTALMGITELGYSFRICVLNAI |
| | | EYGVCQNRKRLIIIGAAPGEELPPFPLPTHQDFFSKDPRRDLLPAVTLD |
| | | DALSTITPESTDHHLNHVWQPAEWKTPYDAHRPFKNAIRAGGGEYD |
| | | IYPDGRRKFTVRELACIQGFPDEYEFVGTLTDKRRIIGNAVPPPLSAAI |
| | | MSTLRQWMTEKDFERMEGGPSSGAPPPSGGSPAGSPTSTEEGTSESA |
| | | TPESGPGTSTEPSEGSAPGSPAGSPTSTEEGTSTEPSEGSAPGTSTEPSE |
| | | PKKKRKVMDKKYSIGLAIGTNSVGWAVITDEYKVPSKKFKVLGNTD |
| | | RHSIKKNLIGALLFDSGETAEATRLKRTARRRYTRRKNRICYLQEIFS |
| | | NEMAKVDDSFFHRLEESFLVEEDKKHERHPIFGNIVDEVAYHEKYPT |
| | | IYHLRKKLVDSTDKADLRLIYLALAHMIKFRGHFLIEGDLNPDNSDV |
| | | DKLFIQLVQTYNQLFEENPINASGVDAKAILSARLSKSRRLENLIAQL |
| | | PGEKKNGLFGNLIALSLGLTPNFKSNFDLAEDAKLQLSKDTYDDDLD |
| | | NLLAQIGDQYADLFLAAKNLSDAILLSDILRVNTEITKAPLSASMIKR |
| | | YDEHHQDLTLLKALVRQQLPEKYKEIFFDQSKNGYAGYIDGGASQE |
| | | EFYKFIKPILEKMDGTEELLVKLNREDLLRKQRTFDNGSIPHQIHLGE |
| | | LHAILRRQEDFYPFLKDNREKIEKILTFRIPYYVGPLARGNSRFAWMT |
| | | RKSEETITPWNFEEVVDKGASAQSFIERMTNFDKNLPNEKVLPKHSL |
| | | LYEYFTVYNELTKVKYVTEGMRKPAFLSGEQKKAIVDLLFKTNRKV |
| | | TVKQLKEDYFKKIECFDSVEISGVEDRFNASLGTYHDLLKIIKDKDFL |
| | | DNEENEDILEDIVLTLTLFEDREMIEERLKTYAHLFDDKVMKQLKRR |
| | | RYTGWGRLSRKLINGIRDKQSGKTILDFLKSDGFANRNFMQLIHDDS |
| | | LTFKEDIQKAQVSGQGDSLHEHIANLAGSPAIKKGILQTVKVVDELV |
| | | KVMGRHKPENIVIEMARENQTTQKGQKNSRERMKRIEEGIKELGSQI |
| | | LKEHPVENTQLQNEKLYLYYLQNGRDMYVDQELDINRLSDYDVDAI |
| | | VPQSFLKDDSIDNKVLTRSDKNRGKSDNVPSEEVVKKMKNYWRQL |
| | | LNAKLITQRKFDNLTKAERGGLSELDKAGFIKRQLVETRQITKHVAQ |
| | | ILDSRMNTKYDENDKLIREVKVITLKSKLVSDFRKDFQFYKVREINN |
| | | YHHAHDAYLNAVVGTALIKKYPKLESEFVYGDYKVYDVRKMIAKS |
| | | EQEIGKATAKYFFYSNIMNFFKTEITLANGEIRKRPLIETNGETGEIVW |
| | | DKGRDFATVRKVLSMPQVNIVKKTEVQTGGFSKESILPKRNSDKLIA |
| | | RKKDWDPKKYGGFDSPTVAYSVLVVAKVEKGKSKKLKSVKELLGI |
| | | TIMERSSFEKNPIDFLEAKGYKEVKKDLIIKLPKYSLFELENGRKRML |
| | | ASAGELQKGNELALPSKYVNFLYLASHYEKLKGSPEDNEQKQLFVE |
| | | QHKHYLDEIIEQISEFSKRVILADANLDKVLSAYNKHRDKPIREQAEN |
| | | IIHLFTLTNLGAPAAFKYFDTTIDRKRYTSTKEVLDATLIHQSITGLYE |
| | | TRIDLSQLGGDPKKKRKV |
| 1157 | Zinc Finger | SRPGERPFQCRICMRNFSNNNNNNNHTRTHTGEKPFQCRICMRNFSN |
| | Array | NNNNNNHLRTH[linker]FQCRICMRNFSNNNNNNNHTRTHTGEKPFQ |
| | | CRICMRNFSNNNNNNNHLRTH[linker]FQCRICMRNFSNNNNNNNHT |
| | | RTHTGEKPFQCRICMRNFSNNNNNNNHLRTHLRGS |

1-134. (canceled)

135. An epigenetic editor comprising a fusion protein, wherein the fusion protein comprises:
(a) a first DNMT domain;
(b) a DNA binding domain; and
(c) a repressor domain,
wherein the repressor domain is selected from the group consisting of: ZIM3, ZNF436, ZNF257, ZNF675, ZNF490, ZNF320, ZNF331, ZNF816, ZNF680, ZNF41, ZNF189, ZNF528, ZNF543, ZNF554, ZNF140, ZNF610, ZNF264, ZNF350, ZNF8, ZNF582, ZNF30, ZNF324, ZNF98, ZNF669, ZNF677, ZNF596, ZNF214, ZNF37A, ZNF34, ZNF250, ZNF547, ZNF273, ZNF354A, ZFP82, ZNF224, ZNF33A, ZNF45, ZNF175, ZNF595, ZNF184, ZNF419, ZFP28-1, ZFP28-2, ZNF18, ZNF213, ZNF394, ZFP1, ZFP14, ZNF416, ZNF557, ZNF566, ZNF729, ZIM2, ZNF254, ZNF764, ZNF785, ZNF10, CBX5, RYBP, YAF2, MGA, CBX1, SCMH1, MPP8, SUMO3, HERC2, BIN1, PCGF2, TOX, FOXA1, FOXA2, IRF2BP1, IRF2BP2, IRF2BPL IRF-2BP1_2 N-terminal domain, HOXA13, HOXB13, HOXC13, HOXA11, HOXC11, HOXC10, HOXA10, HOXB9, HOXA9, ZFP28, ZN334, ZN568, ZN37A, ZN181, ZN510, ZN862, ZN140, ZN208, ZN248, ZN571, ZN699, ZN726, ZIK1, ZNF2, Z705F, ZNF14, ZN471, ZN624, ZNF84, ZNF7, ZN891, ZN337, Z705G, ZN529, ZN729, ZN419, Z705A, ZNF45, ZN302, ZN486, ZN621, ZN688, ZN33A, ZN554, ZN878, ZN772, ZN224, ZN184, ZN544, ZNF57, ZN283, ZN549, ZN211, ZN615, ZN253, ZN226, ZN730, Z585A, ZN732, ZN681, ZN667, ZN649, ZN470, ZN484, ZN431, ZN382, ZN254, ZN124, ZN607, ZN317, ZN620, ZN141, ZN584, ZN540, ZN75D, ZN555, ZN658, ZN684, RBAK, ZN829, ZN582, ZN112, ZN716, HKR1, ZN350, ZN480, ZN416, ZNF92, ZN100, ZN736, ZNF74, CBX1, ZN443, ZN195, ZN530, ZN782, ZN791, ZN331, Z354C, ZN157, ZN727, ZN550, ZN793, ZN235, ZNF8, ZN724, ZN573, ZN577, ZN789, ZN718, ZN300, ZN383, ZN429, ZN677, ZN850, ZN454, ZN257, ZN264, ZFP82, ZFP14, ZN485, ZN737, ZNF44, ZN596, ZN565, ZN543, ZFP69, SUMO1, ZNF12, ZN169, ZN433, SUMO3, ZNF98, ZN175, ZN347, ZNF25, ZN519, Z585B, ZIM3, ZN517, ZN846, ZN230, ZNF66, ZFP1, ZN713, ZN816, ZN426, ZN674, ZN627, ZNF20, Z587B, ZN316, ZN233, ZN611, ZN556, ZN234, ZN560, ZNF77, ZN682, ZN614, ZN785, ZN445, ZFP30, ZN225, ZN551, ZN610, ZN528, ZN284, ZN418, MPP8, ZN490, ZN805, Z780B, ZN763, ZN285, ZNF85, ZN223, ZNF90, ZN557, ZN425, ZN229, ZN606, ZN155, ZN222, ZN442, ZNF91, ZN135, ZN778, RYBP, ZN534, ZN586, ZN567, ZN440, ZN583, ZN441, ZNF43, CBX5, ZN589, ZNF10, ZN563, ZN561, ZN136, ZN630, ZN527, ZN333, Z324B, ZN786, ZN709, ZN792, ZN599, ZN613, ZF69B, ZN799, ZN569, ZN564, ZN546, ZFP92, YAF2, ZN723, ZNF34, ZN439, ZFP57, ZNF19, ZN404, ZN274, CBX3, ZNF30, ZN250, ZN570, ZN675, ZN695, ZN548, ZN132, ZN738, ZN420, ZN626, ZN559, ZN460, ZN268, ZN304, ZIM2, ZN605, ZN844, SUMO5, ZN101, ZN783, ZN417, ZN182, ZN823, ZN177, ZN197, ZN717, ZN669, ZN256, ZN251, CBX4, PCGF2, CDY2, CDYL2, HERC2, ZN562, ZN461, Z324A, ZN766, ID2, TOX, ZN274, SCMH1, ZN214, CBX7, ID1, CREM, SCX, ASCL1, ZN764, SCML2, TWST1, CREB1, TERF1, ID3, CBX8, CBX4, GSX1, NKX22, ATF1, TWST2, ZNF17, TOX3, TOX4, ZMYM3, I2BP1, RHXF1, SSX2, I2BPL, ZN680, CBX1, TRI68, HXA13, PHC3, TCF24, CBX3, HXB13, HEY1, PHC2, ZNF81, FIGLA, SAM11, KMT2B, HEY2, JDP2, HXC13, ASCL4, HHEX, HERC2, GSX2, BIN1, ETV7, ASCL3, PHC1, OTP, I2BP2, VGLL2, HXA11, PDLI4, ASCL2, CDX4, ZN860, LMBL4, PDIP3, NKX25, CEBPB, ISL1, CDX2, PROP1, SIN3B, SMBT1, HXC11, HXC10, PRS6A, VSX1, NKX23, MTG16, HMX3, HMX1, KIF22, CSTF2, CEBPE, DLX2, ZMYM3, PPARG, PRIC1, UNC4, BARX2, ALX3, TCF15, TERA, VSX2, HXD12, CDX1, TCF23, ALX1, HXA10, RX, CXXC5, SCML1, NFIL3, DLX6, MTG8, CBX8, CEBPD, SEC13, FIP1, ALX4, LHX3, PRIC2, MAGI3, NELL1, PRRX1, MTG8R, RAX2, DLX3, DLX1, NKX26, NAB1, SAMD7, PITX3, WDR5, MEOX2, NAB2, DHX8, FOXA2, CBX6, EMX2, CPSF6, HXC12, KDM4B, LMBL3, PHX2A, EMX1, NC2B, DLX4, SRY, ZN777, NELL1, ZN398, GATA3, BSH, SF3B4, TEAD1, TEAD3, RGAP1, PHF1, FOXA1, GATA2, FOXO3, ZN212, IRX4, ZBED6, LHX4, SIN3A, RBBP7, NKX61, TRI68, R51A1, MB3L1, DLX5, NOTC1, TERF2, ZN282, RGS12, ZN840, SPI2B, PAX7, NKX62, ASXL2, FOXO1, GATA3, GATA1, ZMYM5, ZN783, SPI2B, LRP1, MIXL1, SGT1, LMCD1, CEBPA, GATA2, SOX14, WTIP, PRP19, CBX6, NKX11, RBBP4, DMRT2, SMCA2 and fragments thereof.

136. The epigenetic editor of claim 135, wherein at least one of the repressor domains is selected from the group consisting of: SEQ ID NO: 67-595.

137. The epigenetic editor of claim 135, wherein the DNA binding domain binds to a target sequence in a target chromosome comprising a target gene.

138. The epigenetic editor of claim 135, wherein the repressor domain specifically binds to an epigenetic effector protein in a cell comprising a target gene and directs the epigenetic editor to the target gene to effect an epigenetic modification in a nucleotide in the target gene or a histone bound to the target gene.

139. The epigenetic editor of claim 135, wherein the repressor domains is selected from the group consisting of: ZIM3, ZNF264, ZN577, ZN793, ZFP28, ZN627, RYBP, TOX, TOX3, TOX4, I2BP1, SCMH1, SCML2, CDYL2, CBX8, CBX5, and CBX1, and fragments thereof.

140. The epigenetic editor of claim 135, wherein the fusion protein further comprises a second DNMT domain.

141. The epigenetic editor of claim 135, wherein the first DNMT domain is selected from the group consisting of a DNMT3A domain, a DNMT3B domain, a DNMT3C domain, and a DNMT3L domain.

142. The epigenetic editor of claim 135, wherein the first DNMT domain is a human DNMT3A domain or a human DNMT3L domain.

143. The epigenetic editor of claim 142, wherein the first DNMT domain is a DNMT3A domain and the second DNMT domain is a DNMT3L domain, or a catalytic portion thereof.

144. The epigenetic editor of claim 135, wherein the first DNMT domain and the second DNMT domain are selected from the group consisting of SEQ ID NO: 32-66.

145. The epigenetic editor of claim 135, wherein the DNA binding domain comprises a zinc finger motif or a zinc finger array.

146. The epigenetic editor of claim 135, wherein the DNA binding domain comprises a nucleic acid guided DNA binding domain bound to a guide polynucleotide.

147. The epigenetic editor of claim 146, wherein the DNA binding domain comprises CRISPR-Cas protein bound to the guide polynucleotide.

148. The epigenetic editor of claim 146, wherein the guide polynucleotide hybridizes with a target sequence.

149. The epigenetic editor of claim 147, wherein the CRISPR-Cas protein comprises a nuclease inactive Cas9 (dCas9).

150. The epigenetic editor of claim 149, wherein the dCas9 is a dSpCas9.

151. The epigenetic editor of claim 150, wherein the dSpCas9 is defined as SEQ ID NO: 3.

152. The epigenetic editor of claim 135, wherein the fusion protein domain comprises from N-terminus to C-terminus DNMT3A-DNMT3L-dSpCas9—the repressor domain.

153. A method of modifying an epigenetic state of a target gene in a target chromosome, the method comprising contacting the target chromosome with an epigenetic editor, wherein the epigenetic editor comprises:
(a) a first DNMT domain;
(b) a DNA binding domain; and
(c) a repressor domain,
wherein the repressor domain is selected from the group consisting of: ZIM3, ZNF436, ZNF257, ZNF675, ZNF490, ZNF320, ZNF331, ZNF816, ZNF680, ZNF41, ZNF189, ZNF528, ZNF543, ZNF554, ZNF140, ZNF610, ZNF264, ZNF350, ZNF8, ZNF582, ZNF30, ZNF324, ZNF98, ZNF669, ZNF677, ZNF596, ZNF214, ZNF37A, ZNF34, ZNF250, ZNF547, ZNF273, ZNF354A, ZFP82, ZNF224, ZNF33A, ZNF45, ZNF175, ZNF595, ZNF184, ZNF419, ZFP28-1, ZFP28-2, ZNF18, ZNF213, ZNF394, ZFP1, ZFP14, ZNF416, ZNF557, ZNF566, ZNF729, ZIM2, ZNF254, ZNF764, ZNF785, ZNF10, CBX5, RYBP, YAF2, MGA, CBX1, SCMH1, MPP8, SUMO3, HERC2, BIN1, PCGF2, TOX, FOXA1, FOXA2, IRF2BP1, IRF2BP2, IRF2BPL IRF-2BP1_2 N-terminal domain, HOXA13, HOXB13, HOXC13, HOXA11, HOXC11, HOXC10, HOXA10, HOXB9, HOXA9, ZFP28, ZN334, ZN568, ZN37A, ZN181, ZN510, ZN862, ZN140, ZN208, ZN248, ZN571, ZN699, ZN726, ZIK1, ZNF2, Z705F, ZNF14, ZN471, ZN624, ZNF84, ZNF7, ZN891, ZN337, Z705G, ZN529, ZN729, ZN419, Z705A, ZNF45, ZN302, ZN486, ZN621, ZN688, ZN33A, ZN554, ZN878, ZN772, ZN224, ZN184, ZN544, ZNF57, ZN283, ZN549, ZN211, ZN615, ZN253, ZN226, ZN730, Z585A, ZN732, ZN681, ZN667, ZN649, ZN470, ZN484, ZN431, ZN382, ZN254, ZN124, ZN607, ZN317, ZN620, ZN141, ZN584, ZN540, ZN75D, ZN555, ZN658, ZN684, RBAK, ZN829, ZN582, ZN112, ZN716, HKR1, ZN350, ZN480, ZN416, ZNF92, ZN100, ZN736, ZNF74, CBX1, ZN443, ZN195, ZN530, ZN782, ZN791, ZN331, Z354C, ZN157, ZN727, ZN550, ZN793, ZN235, ZNF8, ZN724, ZN573, ZN577, ZN789, ZN718, ZN300, ZN383, ZN429, ZN677, ZN850, ZN454, ZN257, ZN264, ZFP82, ZFP14, ZN485, ZN737, ZNF44, ZN596, ZN565, ZN543, ZFP69, SUMO1, ZNF12, ZN169, ZN433, SUMO3, ZNF98, ZN175, ZN347, ZNF25, ZN519, Z585B, ZIM3, ZN517, ZN846, ZN230, ZNF66, ZFP1, ZN713, ZN816, ZN426, ZN674, ZN627, ZNF20, Z587B, ZN316, ZN233, ZN611, ZN556, ZN234, ZN560, ZNF77, ZN682, ZN614, ZN785, ZN445, ZFP30, ZN225, ZN551, ZN610, ZN528, ZN284, ZN418, MPP8, ZN490, ZN805, Z780B, ZN763, ZN285, ZNF85, ZN223, ZNF90, ZN557, ZN425, ZN229, ZN606, ZN155, ZN222, ZN442, ZNF91, ZN135, ZN778, RYBP, ZN534, ZN586, ZN567, ZN440, ZN583, ZN441, ZNF43, CBX5, ZN589, ZNF10, ZN563, ZN561, ZN136, ZN630, ZN527, ZN333, Z324B, ZN786, ZN709, ZN792, ZN599, ZN613, ZF69B, ZN799, ZN569, ZN564, ZN546, ZFP92, YAF2, ZN723, ZNF34, ZN439, ZFP57, ZNF19, ZN404, ZN274, CBX3, ZNF30, ZN250, ZN570, ZN675, ZN695, ZN548, ZN132, ZN738, ZN420, ZN626, ZN559, ZN460, ZN268, ZN304, ZIM2, ZN605, ZN844, SUMO5, ZN101, ZN783, ZN417, ZN182, ZN823, ZN177, ZN197, ZN717, ZN669, ZN256, ZN251, CBX4, PCGF2, CDY2, CDYL2, HERC2, ZN562, ZN461, Z324A, ZN766, ID2, TOX, ZN274, SCMH1, ZN214, CBX7, ID1, CREM, SCX, ASCL1, ZN764, SCML2, TWST1, CREB1, TERF1, ID3, CBX8, CBX4, GSX1, NKX22, ATF1, TWST2, ZNF17, TOX3, TOX4, ZMYM3, I2BP1, RHXF1, SSX2, I2BPL, ZN680, CBX1, TRI68, HXA13, PHC3, TCF24, CBX3, HXB13, HEY1, PHC2, ZNF81, FIGLA, SAM11, KMT2B, HEY2, JDP2, HXC13, ASCL4, HHEX, HERC2, GSX2, BIN1, ETV7, ASCL3, PHC1, OTP, I2BP2, VGLL2, HXA11, PDLI4, ASCL2, CDX4, ZN860, LMBL4, PDIP3, NKX25, CEBPB, ISL1, CDX2, PROP1, SIN3B, SMBT1, HXC11, HXC10, PRS6A, VSX1, NKX23, MTG16, HMX3, HMX1, KIF22, CSTF2, CEBPE, DLX2, ZMYM3, PPARG, PRIC1, UNC4, BARX2, ALX3, TCF15, TERA, VSX2, HXD12, CDX1, TCF23, ALX1, HXA10, RX, CXXC5, SCML1, NFIL3, DLX6, MTG8, CBX8, CEBPD, SEC13, FIP1, ALX4, LHX3, PRIC2, MAGI3, NELL1, PRRX1, MTG8R, RAX2, DLX3, DLX1, NKX26, NAB1, SAMD7, PITX3, WDR5, MEOX2, NAB2, DHX8, FOXA2, CBX6, EMX2, CPSF6, HXC12, KDM4B, LMBL3, PHX2A, EMX1, NC2B, DLX4, SRY, ZN777, NELL1, ZN398, GATA3, BSH, SF3B4, TEAD1, TEAD3, RGAP1, PHF1, FOXA1, GATA2, FOXO3, ZN212, IRX4, ZBED6, LHX4, SIN3A, RBBP7, NKX61, TRI68, R51A1, MB3L1, DLX5, NOTC1, TERF2, ZN282, RGS12, ZN840, SPI2B, PAX7, NKX62, ASXL2, FOXO1, GATA3, GATA1, ZMYM5, ZN783, SPI2B, LRP1, MIXL1, SGT1, LMCD1, CEBPA, GATA2, SOX14, WTIP, PRP19, CBX6, NKX11, RBBP4, DMRT2, SMCA2 and fragments thereof.

154. A method of treating a disease in a subject in need thereof, the method comprising administering to the subject an epigenetic editor, wherein the epigenetic editor comprises:
(a) a first DNMT domain;
(b) a DNA binding domain; and
(c) a repressor domain,
wherein the repressor domain is selected from the group consisting of: ZIM3, ZNF436, ZNF257, ZNF675, ZNF490, ZNF320, ZNF331, ZNF816, ZNF680, ZNF41, ZNF189, ZNF528, ZNF543, ZNF554, ZNF140, ZNF610, ZNF264, ZNF350, ZNF8, ZNF582, ZNF30, ZNF324, ZNF98, ZNF669, ZNF677, ZNF596, ZNF214, ZNF37A, ZNF34, ZNF250, ZNF547, ZNF273, ZNF354A, ZFP82, ZNF224, ZNF33A, ZNF45, ZNF175, ZNF595, ZNF184, ZNF419, ZFP28-1, ZFP28-2, ZNF18, ZNF213, ZNF394, ZFP1, ZFP14, ZNF416, ZNF557, ZNF566, ZNF729, ZIM2, ZNF254, ZNF764, ZNF785, ZNF10, CBX5, RYBP, YAF2, MGA, CBX1, SCMH1, MPP8, SUMO3, HERC2, BIN1, PCGF2, TOX, FOXA1, FOXA2, IRF2BP1, IRF2BP2, IRF2BPL IRF-2BP1_2 N-terminal domain, HOXA13, HOXB13, HOXC13, HOXA11, HOXC11, HOXC10, HOXA10, HOXB9, HOXA9, ZFP28, ZN334, ZN568, ZN37A, ZN181, ZN510, ZN862, ZN140, ZN208, ZN248, ZN571, ZN699, ZN726, ZIK1, ZNF2, Z705F, ZNF14, ZN471, ZN624, ZNF84, ZNF7, ZN891, ZN337, Z705G, ZN529, ZN729, ZN419, Z705A, ZNF45, ZN302, ZN486, ZN621, ZN688, ZN33A, ZN554, ZN878, ZN772, ZN224, ZN184, ZN544, ZNF57, ZN283, ZN549, ZN211, ZN615, ZN253, ZN226, ZN730, Z585A, ZN732, ZN681, ZN667, ZN649, ZN470, ZN484, ZN431, ZN382, ZN254, ZN124, ZN607, ZN317, ZN620, ZN141, ZN584, ZN540, ZN75D, ZN555, ZN658, ZN684, RBAK, ZN829, ZN582, ZN112, ZN716, HKR1, ZN350, ZN480, ZN416, ZNF92, ZN100, ZN736, ZNF74, CBX1, ZN443, ZN195, ZN530, ZN782, ZN791, ZN331, Z354C, ZN157, ZN727, ZN550, ZN793, ZN235, ZNF8, ZN724, ZN573, ZN577, ZN789, ZN718, ZN300, ZN383, ZN429, ZN677, ZN850, ZN454, ZN257, ZN264, ZFP82, ZFP14, ZN485, ZN737, ZNF44, ZN596, ZN565, ZN543, ZFP69, SUMO1, ZNF12, ZN169, ZN433, SUMO3, ZNF98, ZN175, ZN347, ZNF25, ZN519, Z585B, ZIM3, ZN517, ZN846, ZN230, ZNF66, ZFP1, ZN713, ZN816, ZN426, ZN674, ZN627, ZNF20, Z587B, ZN316, ZN233, ZN611, ZN556, ZN234, ZN560, ZNF77, ZN682, ZN614, ZN785, ZN445, ZFP30, ZN225, ZN551, ZN610, ZN528, ZN284, ZN418, MPP8, ZN490, ZN805, Z780B, ZN763, ZN285, ZNF85, ZN223, ZNF90, ZN557, ZN425, ZN229, ZN606, ZN155, ZN222, ZN442, ZNF91, ZN135, ZN778, RYBP, ZN534, ZN586, ZN567, ZN440, ZN583, ZN441, ZNF43, CBX5, ZN589, ZNF10, ZN563, ZN561, ZN136, ZN630, ZN527, ZN333, Z324B, ZN786, ZN709, ZN792, ZN599, ZN613, ZF69B, ZN799, ZN569, ZN564, ZN546, ZFP92, YAF2, ZN723, ZNF34, ZN439, ZFP57, ZNF19, ZN404, ZN274, CBX3, ZNF30, ZN250, ZN570, ZN675, ZN695, ZN548, ZN132, ZN738, ZN420, ZN626, ZN559, ZN460, ZN268, ZN304, ZIM2, ZN605, ZN844, SUMO5, ZN101, ZN783, ZN417, ZN182, ZN823, ZN177, ZN197, ZN717, ZN669, ZN256, ZN251, CBX4, PCGF2, CDY2, CDYL2, HERC2, ZN562, ZN461, Z324A, ZN766, ID2, TOX, ZN274, SCMH1, ZN214, CBX7, ID1, CREM, SCX, ASCL1, ZN764, SCML2, TWST1, CREB1, TERF1, ID3, CBX8, CBX4, GSX1, NKX22, ATF1, TWST2, ZNF17, TOX3, TOX4, ZMYM3, I2BP1, RHXF1, SSX2, I2BPL, ZN680, CBX1, TRI68, HXA13, PHC3, TCF24, CBX3, HXB13, HEY1, PHC2, ZNF81, FIGLA, SAM11, KMT2B, HEY2, JDP2, HXC13, ASCL4, HHEX, HERC2, GSX2, BIN1, ETV7, ASCL3, PHC1, OTP, I2BP2, VGLL2, HXA11, PDLI4, ASCL2, CDX4, ZN860, LMBL4, PDIP3, NKX25, CEBPB, ISL1, CDX2, PROP1, SIN3B, SMBT1, HXC11, HXC10, PRS6A, VSX1, NKX23, MTG16, HMX3, HMX1, KIF22, CSTF2, CEBPE, DLX2, ZMYM3, PPARG, PRIC1, UNC4, BARX2, ALX3, TCF15, TERA, VSX2, HXD12, CDX1, TCF23, ALX1, HXA10, RX, CXXC5, SCML1, NFIL3, DLX6, MTG8, CBX8, CEBPD, SEC13, FIP1, ALX4, LHX3, PRIC2, MAGI3, NELL1, PRRX1, MTG8R, RAX2, DLX3, DLX1, NKX26, NAB1, SAMD7, PITX3, WDR5, MEOX2, NAB2, DHX8, FOXA2, CBX6, EMX2, CPSF6, HXC12, KDM4B, LMBL3, PHX2A, EMX1, NC2B, DLX4, SRY, ZN777, NELL1, ZN398, GATA3, BSH, SF3B4, TEAD1, TEAD3, RGAP1, PHF1, FOXA1, GATA2, FOXO3, ZN212, IRX4, ZBED6, LHX4, SIN3A, RBBP7, NKX61, TRI68, R51A1, MB3L1, DLX5, NOTC1, TERF2, ZN282, RGS12, ZN840, SPI2B, PAX7, NKX62, ASXL2, FOXO1, GATA3, GATA1, ZMYM5, ZN783, SPI2B, LRP1, MIXL1, SGT1, LMCD1, CEBPA, GATA2, SOX14, WTIP, PRP19, CBX6, NKX11, RBBP4, DMRT2, SMCA2 and fragments thereof.

The application's sequence listing, which the Patent Office published only in electronic form, follows.

SEQUENCE LISTING (1164 sequences)

SEQ ID NO: 1 - DNA, 4107 bp, Streptococcus pyogenes
  source 1..4107: mol_type = other DNA
atggataagaaatactcaataggcttagatatcggcacaaatagcgtcggatgggcggtgatcactgatgaatataaggttccgtctaaaaagttcaaggttctgggaaatacagaccgccacagtatcaaaaaaaatcttataggggctcttttatttgacagtggagagacagcggaagcgactcgtctcaaacggacagctcgtagaaggtatacacgtcggaagaatcgtatttgttatctacaggagattttttcaaatgagatggcgaaagtagatgatagtttctttcatcgacttgaagagtcttttttggtggaagaagacaagaagcatgaacgtcatcctatttttggaaatatagtagatgaagttgcttatcatgagaaatatccaactatctatcatctgcgaaaaaaattggtagattctactgataaagcggatttgcgcttaatctatttggccttagcgcatatgattaagtttcgtggtcattttttgattgagggagatttaaatcctgataatagtgatgtggacaaactatttatccagttggtacaaacctacaatcaattatttgaagaaaaccctattaacgcaagtggagtagatgctaaagcgattctttctgcacgattgagtaaatcaagacgattagaaaatctcattgctcagctccccggtgagaagaaaaatggcttatttgggaatctcattgctttgtcattgggtttgacccctaattttaaatcaaattttgatttggcagaagatgctaaattacagctttcaaaagatacttacgatgatgatttagataatttattggcgcaaattggagatcaatatgctgatttgtttttggcagctaagaatttatcagatgctattttactttcagatatcctaagagtaaatactgaaataactaaggctcccctatcagcttcaatgattaaacgctacgatgaacatcatcaagacttgactcttttaaaagctttagttcgacaacaacttccagaaaagtataaagaaatcttttttgatcaatcaaaaaacggatatgcaggttatattgatgggggagctagccaagaagaattttataaatttatcaaaccaattttagaaaaaatggatggtactgaggaattattggtgaaactaaatcgtgaagatttgctgcgcaagcaacggacctttgacaacggctctattccccatcaaattcacttgggtgagctgcatgctattttgagaagacaagaagacttttatccatttttaaaagacaatcgtgagaagattgaaaaaatcttgacttttcgaattccttattatgttggtccattggcgcgtggcaatagtcgttttgcatggatgactcggaagtctgaagaaacaattaccccatggaattttgaagaagttgtcgataaaggtgcttcagctcaatcatttattgaacgcatgacaaactttgataaaaatcttccaaatgaaaaagtactaccaaaacatagtttgctttatgagtattttacggtttataacgaattgacaaaggtcaaatatgttactgaaggaatgcgaaaaccagcatttctttcaggtgaacagaagaaagccattgttgatttactcttcaaaacaaatcgaaaagtaaccgttaagcaattaaaagaagattatttcaaaaaaatagaatgttttgatagtgttgaaatttcaggagttgaagatagatttaatgcttcattaggtacctaccatgatttgctaaaaattattaaagataaagattttttggataatgaagaaaatgaagatatcttagaggatattgttttaacattgaccttatttgaagatagggagatgattgaggaaagacttaaaacatatgctcacctctttgatgataaggtgatgaaacagcttaaacgtcgccgttatactggttggggacgtttgtctcgaaaattgattaatggtattagggataagcaatctggcaaaacaatattagattttttgaaatcagatggttttgccaatcgcaattttatgcagctgatccatgatgatagtttgacatttaaagaagacattcaaaaagcacaagtgtctggacaaggcgatagtttacatgaacatattgcaaatttagctggtagccctgctattaaaaaaggtattttacagactgtaaaagttgttgatgaattggtcaaagtaatggggcggcataagccagaaaatatcgttattgaaatggcacgtgaaaatcagacaactcaaaagggccagaaaaattcgcgagagcgtatgaaacgaatcgaagaaggtatcaaagaattaggaagtcagattcttaaagagcatcctgttgaaaatactcaattgcaaaatgaaaagctctatctctattatctccaaaatggaagagacatgtatgtggaccaagaattagatattaatcgtttaagtgattatgatgtcgatcacattgttccacaaagtttccttaaagacgattcaatagacaataaggtcttaacgcgttctgataaaaatcgtggtaaatcggataacgttccaagtgaagaagtagtcaaaaagatgaaaaactattggagacaacttctaaacgccaagttaatcactcaacgtaagtttgataatttaacgaaagctgaacgtggaggtttgagtgaacttgataaagctggttttatcaaacgccaattggttgaaactcgccaaatcactaagcatgtggcacaaattttggatagtcgcatgaatactaaatacgatgaaaatgataaacttattcgagaggttaaagtgattaccttaaaatctaaattagtttctgacttccgaaaagatttccaattctataaagtacgtgagattaacaattaccatcatgcccatgatgcgtatctaaatgccgtcgttggaactgctttgattaagaaatatccaaaacttgaatcggagtttgtctatggtgattataaagtttatgatgttcgtaaaatgattgctaagtctgagcaagaaataggcaaagcaaccgcaaaatatttcttttactctaatatcatgaacttcttcaaaacagaaattacacttgcaaatggagagattcgcaaacgccctctaatcgaaactaatggggaaactggagaaattgtctgggataaagggcgagattttgccacagtgcgcaaagtattgtccatgccccaagtcaatattgtcaagaaaacagaagtacagacaggcggattctccaaggagtcaattttaccaaaaagaaattcggacaagcttattgctcgtaaaaaagactgggatccaaaaaaatatggtggttttgatagtccaacggtagcttattcagtcctagtggttgctaaggtggaaaaagggaaatcgaagaagttaaaatccgttaaagagttactagggatcacaattatggaaagaagttcctttgaaaaaaatccgattgactttttagaagctaaaggatataaggaagttaaaaaagacttaatcattaaactacctaaatatagtctttttgagttagaaaacggtcgtaaacggatgctggctagtgccggagaattacaaaaaggaaatgagctggctctgccaagcaaatatgtgaattttttatatttagctagtcattatgaaaagttgaagggtagtccagaagataacgaacaaaaacaattgtttgtggagcagcataagcattatttagatgagattattgagcaaatcagtgaattttctaagcgtgttattttagcagatgccaatttagataaagttcttagtgcatataacaaacatagagacaaaccaatacgtgaacaagcagaaaatattattcatttatttacgttgacgaatcttggagctcccgctgcttttaaatattttgatacaacaattgatcgtaaacgatatacgtctacaaaagaagttttagatgccactcttatccatcaatccatcactggtctttatgaaacacgcattgatttgagtcagctaggaggtgactga

SEQ ID NO: 2 - protein, 1368 aa, Streptococcus pyogenes [sequence omitted]

SEQ ID NO: 3 - protein, 1368 aa, synthetic construct
  REGION 1..1368: note = Description of Artificial Sequence: Synthetic polypeptide
MDKKYSIGLAIGTNSVGWAVITDEYKVPSKKFKVLGNTDRHSIKKNLIGALLFDSGETAEATRLKRTARRRYTRRKNRICYLQEIFSNEMAKVDDSFFHRLEESFLVEEDKKHERHPIFGNIVDEVAYHEKYPTIYHLRKKLVDSTDKADLRLIYLALAHMIKFRGHFLIEGDLNPDNSDVDKLFIQLVQTYNQLFEENPINASGVDAKAILSARLSKSRRLENLIAQLPGEKKNGLFGNLIALSLGLTPNFKSNFDLAEDAKLQLSKDTYDDDLDNLLAQIGDQYADLFLAAKNLSDAILLSDILRVNTEITKAPLSASMIKRYDEHHQDLTLLKALVRQQLPEKYKEIFFDQSKNGYAGYIDGGASQEEFYKFIKPILEKMDGTEELLVKLNREDLLRKQRTFDNGSIPHQIHLGELHAILRRQEDFYPFLKDNREKIEKILTFRIPYYVGPLARGNSRFAWMTRKSEETITPWNFEEVVDKGASAQSFIERMTNFDKNLPNEKVLPKHSLLYEYFTVYNELTKVKYVTEGMRKPAFLSGEQKKAIVDLLFKTNRKVTVKQLKEDYFKKIECFDSVEISGVEDRFNASLGTYHDLLKIIKDKDFLDNEENEDILEDIVLTLTLFEDREMIEERLKTYAHLFDDKVMKQLKRRRYTGWGRLSRKLINGIRDKQSGKTILDFLKSDGFANRNFMQLIHDDSLTFKEDIQKAQVSGQGDSLHEHIANLAGSPAIKKGILQTVKVVDELVKVMGRHKPENIVIEMARENQTTQKGQKNSRERMKRIEEGIKELGSQILKEHPVENTQLQNEKLYLYYLQNGRDMYVDQELDINRLSDYDVDAIVPQSFLKDDSIDNKVLTRSDKNRGKSDNVPSEEVVKKMKNYWRQLLNAKLITQRKFDNLTKAERGGLSELDKAGFIKRQLVETRQITKHVAQILDSRMNTKYDENDKLIREVKVITLKSKLVSDFRKDFQFYKVREINNYHHAHDAYLNAVVGTALIKKYPKLESEFVYGDYKVYDVRKMIAKSEQEIGKATAKYFFYSNIMNFFKTEITLANGEIRKRPLIETNGETGEIVWDKGRDFATVRKVLSMPQVNIVKKTEVQTGGFSKESILPKRNSDKLIARKKDWDPKKYGGFDSPTVAYSVLVVAKVEKGKSKKLKSVKELLGITIMERSSFEKNPIDFLEAKGYKEVKKDLIIKLPKYSLFELENGRKRMLASAGELQKGNELALPSKYVNFLYLASHYEKLKGSPEDNEQKQLFVEQHKHYLDEIIEQISEFSKRVILADANLDKVLSAYNKHRDKPIREQAENIIHLFTLTNLGAPAAFKYFDTTIDRKRYTSTKEVLDATLIHQSITGLYETRIDLSQLGGD

SEQ ID NO: 4 - protein, 1368 aa, synthetic construct
  REGION 1..1368: note = Description of Artificial Sequence: Synthetic polypeptide
MDKKYSIGLAIGTNSVGWAVITDEYKVPSKKFKVLGNTDRHSIKKNLIGALLFDSGETAEATRLKRTARRRYTRRKNRICYLQEIFSNEMAKVDDSFFHRLEESFLVEEDKKHERHPIFGNIVDEVAYHEKYPTIYHLRKKLVDSTDKADLRLIYLALAHMIKFRGHFLIEGDLNPDNSDVDKLFIQLVQTYNQLFEENPINASGVDAKAILSARLSKSRRLENLIAQLPGEKKNGLFGNLIALSLGLTPNFKSNFDLAEDAKLQLSKDTYDDDLDNLLAQIGDQYADLFLAAKNLSDAILLSDILRVNTEITKAPLSASMIKRYDEHHQDLTLLKALVRQQLPEKYKEIFFDQSKNGYAGYIDGGASQEEFYKFIKPILEKMDGTEELLVKLNREDLLRKQRTFDNGSIPHQIHLGELHAILRRQEDFYPFLKDNREKIEKILTFRIPYYVGPLARGNSRFAWMTRKSEETITPWNFEEVVDKGASAQSFIERMTNFDKNLPNEKVLPKHSLLYEYFTVYNELTKVKYVTEGMRKPAFLSGEQKKAIVDLLFKTNRKVTVKQLKEDYFKKIECFDSVEISGVEDRFNASLGTYHDLLKIIKDKDFLDNEENEDILEDIVLTLTLFEDREMIEERLKTYAHLFDDKVMKQLKRRRYTGWGRLSRKLINGIRDKQSGKTILDFLKSDGFANRNFMQLIHDDSLTFKEDIQKAQVSGQGDSLHEHIANLAGSPAIKKGILQTVKVVDELVKVMGRHKPENIVIEMARENQTTQKGQKNSRERMKRIEEGIKELGSQILKEHPVENTQLQNEKLYLYYLQNGRDMYVDQELDINRLSDYDVDAIVPQSFLKDDSIDNKVLTRSDKNRGKSDNVPSEEVVKKMKNYWRQLLNAKLITQRKFDNLTKAERGGLSELDKAGFIKRQLVETRQITKHVAQILDSRMNTKYDENDKLIREVKVITLKSKLVSDFRKDFQFYKVREINNYHHAHDAYLNAVVGTALIKKYPKLESEFVYGDYKVYDVRKMIAKSEQEIGKATAKYFFYSNIMNFFKTEITLANGEIRKRPLIETNGETGEIVWDKGRDFATVRKVLSMPQVNIVKKTEVQTGGFSKESILPKRNSDKLIARKKDWDPKKYGGFVSPTVAYSVLVVAKVEKGKSKKLKSVKELLGITIMERSSFEKNPIDFLEAKGYKEVKKDLIIKLPKYSLFELENGRKRMLASARELQKGNELALPSKYVNFLYLASHYEKLKGSPEDNEQKQLFVEQHKHYLDEIIEQISEFSKRVILADANLDKVLSAYNKHRDKPIREQAENIIHLFTLTNLGAPAAFKYFDTTIDRKEYRSTKEVLDATLIHQSITGLYETRIDLSQLGGD

SEQ ID NO: 5 - protein, 1368 aa, synthetic construct
  REGION 1..1368: note = Description of Artificial Sequence: Synthetic polypeptide
MDKKYSIGLAIGTNSVGWAVITDEYKVPSKKFKVLGNTDRHSIKKNLIGALLFDSGETAEATRLKRTARRRYTRRKNRICYLQEIFSNEMAKVDDSFFHRLEESFLVEEDKKHERHPIFGNIVDEVAYHEKYPTIYHLRKKLVDSTDKADLRLIYLALAHMIKFRGHFLIEGDLNPDNSDVDKLFIQLVQTYNQLFEENPINASGVDAKAILSARLSKSRRLENLIAQLPGEKKNGLFGNLIALSLGLTPNFKSNFDLAEDAKLQLSKDTYDDDLDNLLAQIGDQYADLFLAAKNLSDAILLSDILRVNTEITKAPLSASMIKRYDEHHQDLTLLKALVRQQLPEKYKEIFFDQSKNGYAGYIDGGASQEEFYKFIKPILEKMDGTEELLVKLNREDLLRKQRTFDNGSIPHQIHLGELHAILRRQEDFYPFLKDNREKIEKILTFRIPYYVGPLARGNSRFAWMTRKSEETITPWNFEEVVDKGASAQSFIERMTNFDKNLPNEKVLPKHSLLYEYFTVYNELTKVKYVTEGMRKPAFLSGEQKKAIVDLLFKTNRKVTVKQLKEDYFKKIECFDSVEISGVEDRFNASLGTYHDLLKIIKDKDFLDNEENEDILEDIVLTLTLFEDREMIEERLKTYAHLFDDKVMKQLKRRRYTGWGRLSRKLINGIRDKQSGKTILDFLKSDGFANRNFMQLIHDDSLTFKEDIQKAQVSGQGDSLHEHIANLAGSPAIKKGILQTVKVVDELVKVMGRHKPENIVIEMARENQTTQKGQKNSRERMKRIEEGIKELGSQILKEHPVENTQLQNEKLYLYYLQNGRDMYVDQELDINRLSDYDVDAIVPQSFLKDDSIDNKVLTRSDKNRGKSDNVPSEEVVKKMKNYWRQLLNAKLITQRKFDNLTKAERGGLSELDKAGFIKRQLVETRQITKHVAQILDSRMNTKYDENDKLIREVKVITLKSKLVSDFRKDFQFYKVREINNYHHAHDAYLNAVVGTALIKKYPKLESEFVYGDYKVYDVRKMIAKSEQEIGKATAKYFFYSNIMNFFKTEITLANGEIRKRPLIETNGETGEIVWDKGRDFATVRKVLSMPQVNIVKKTEVQTGGFSKESILPKRNSDKLIARKKDWDPKKYGGFESPTVAYSVLVVAKVEKGKSKKLKSVKELLGITIMERSSFEKNPIDFLEAKGYKEVKKDLIIKLPKYSLFELENGRKRMLASAGELQKGNELALPSKYVNFLYLASHYEKLKGSPEDNEQKQLFVEQHKHYLDEIIEQISEFSKRVILADANLDKVLSAYNKHRDKPIREQAENIIHLFTLTNLGAPAAFKYFDTTIDRKQYRSTKEVLDATLIHQSITGLYETRIDLSQLGGD

SEQ ID NO: 6 - protein, 1368 aa, synthetic construct
  REGION 1..1368: note = Description of Artificial Sequence: Synthetic polypeptide
MDKKYSIGLAIGTNSVGWAVITDEYKVPSKKFKVLGNTDRHSIKKNLIGALLFDSGETAEATRLKRTARRRYTRRKNRICYLQEIFSNEMAKVDDSFFHRLEESFLVEEDKKHERHPIFGNIVDEVAYHEKYPTIYHLRKKLVDSTDKADLRLIYLALAHMIKFRGHFLIEGDLNPDNSDVDKLFIQLVQTYNQLFEENPINASGVDAKAILSARLSKSRRLENLIAQLPGEKKNGLFGNLIALSLGLTPNFKSNFDLAEDAKLQLSKDTYDDDLDNLLAQIGDQYADLFLAAKNLSDAILLSDILRVNTEITKAPLSASMIKRYDEHHQDLTLLKALVRQQLPEKYKEIFFDQSKNGYAGYIDGGASQEEFYKFIKPILEKMDGTEELLVKLNREDLLRKQRTFDNGSIPHQIHLGELHAILRRQEDFYPFLKDNREKIEKILTFRIPYYVGPLARGNSRFAWMTRKSEETITPWNFEEVVDKGASAQSFIERMTNFDKNLPNEKVLPKHSLLYEYFTVYNELTKVKYVTEGMRKPAFLSGEQKKAIVDLLFKTNRKVTVKQLKEDYFKKIECFDSVEISGVEDRFNASLGTYHDLLKIIKDKDFLDNEENEDILEDIVLTLTLFEDREMIEERLKTYAHLFDDKVMKQLKRRRYTGWGRLSRKLINGIRDKQSGKTILDFLKSDGFANRNFMQLIHDDSLTFKEDIQKAQVSGQGDSLHEHIANLAGSPAIKKGILQTVKVVDELVKVMGRHKPENIVIEMARENQTTQKGQKNSRERMKRIEEGIKELGSQILKEHPVENTQLQNEKLYLYYLQNGRDMYVDQELDINRLSDYDVDAIVPQSFLKDDSIDNKVLTRSDKNRGKSDNVPSEEVVKKMKNYWRQLLNAKLITQRKFDNLTKAERGGLSELDKAGFIKRQLVETRQITKHVAQILDSRMNTKYDENDKLIREVKVITLKSKLVSDFRKDFQFYKVREINNYHHAHDAYLNAVVGTALIKKYPKLESEFVYGDYKVYDVRKMIAKSEQEIGKATAKYFFYSNIMNFFKTEITLANGEIRKRPLIETNGETGEIVWDKGRDFATVRKVLSMPQVNIVKKTEVQTGGFSKESILPKRNSDKLIARKKDWDPKKYGGFVSPTVAYSVLVVAKVEKGKSKKLKSVKELLGITIMERSSFEKNPIDFLEAKGYKEVKKDLIIKLPKYSLFELENGRKRMLASAGELQKGNELALPSKYVNFLYLASHYEKLKGSPEDNEQKQLFVEQHKHYLDEIIEQISEFSKRVILADANLDKVLSAYNKHRDKPIREQAENIIHLFTLTNLGAPAAFKYFDTTIDRKQYRSTKEVLDATLIHQSITGLYETRIDLSQLGGD

SEQ ID NO: 7 - protein, 1368 aa, synthetic construct
  REGION 1..1368: note = Description of Artificial Sequence: Synthetic polypeptide
MDKKYSIGLAIGTNSVGWAVITDEYKVPSKKFKVLGNTDRHSIKKNLIGALLFDSGETAEATRLKRTARRRYTRRKNRICYLQEIFSNEMAKVDDSFFHRLEESFLVEEDKKHERHPIFGNIVDEVAYHEKYPTIYHLRKKLVDSTDKADLRLIYLALAHMIKFRGHFLIEGDLNPDNSDVDKLFIQLVQTYNQLFEENPINASGVDAKAILSARLSKSRRLENLIAQLPGEKKNGLFGNLIALSLGLTPNFKSNFDLAEDAKLQLSKDTYDDDLDNLLAQIGDQYADLFLAAKNLSDAILLSDILRVNTEITKAPLSASMIKRYDEHHQDLTLLKALVRQQLPEKYKEIFFDQSKNGYAGYIDGGASQEEFYKFIKPILEKMDGTEELLVKLNREDLLRKQRTFDNGSIPHQIHLGELHAILRRQEDFYPFLKDNREKIEKILTFRIPYYVGPLARGNSRFAWMTRKSEETITPWNFEEVVDKGASAQSFIERMTNFDKNLPNEKVLPKHSLLYEYFTVYNELTKVKYVTEGMRKPAFLSGEQKKAIVDLLFKTNRKVTVKQLKEDYFKKIECFDSVEISGVEDRFNASLGTYHDLLKIIKDKDFLDNEENEDILEDIVLTLTLFEDREMIEERLKTYAHLFDDKVMKQLKRRRYTGWGRLSRKLINGIRDKQSGKTILDFLKSDGFANRNFMQLIHDDSLTFKEDIQKAQVSGQGDSLHEHIANLAGSPAIKKGILQTVKVVDELVKVMGRHKPENIVIEMARENQTTQKGQKNSRERMKRIEEGIKELGSQILKEHPVENTQLQNEKLYLYYLQNGRDMYVDQELDINRLSDYDVDAIVPQSFLKDDSIDNKVLTRSDKNRGKSDNVPSEEVVKKMKNYWRQLLNAKLITQRKFDNLTKAERGGLSELDKAGFIKRQLVETRQITKHVAQILDSRMNTKYDENDKLIREVKVITLKSKLVSDFRKDFQFYKVREINNYHHAHDAYLNAVVGTALIKKYPKLESEFVYGDYKVYDVRKMIAKSEQEIGKATAKYFFYSNIMNFFKTEITLANGEIRKRPLIETNGETGEIVWDKGRDFATVRKVLSMPQVNIVKKTEVQTGGFSKESILPKRNSDKLIARKKDWDPKKYGGFLWPTVAYSVLVVAKVEKGKSKKLKSVKELLGITIMERSSFEKNPIDFLEAKGYKEVKKDLIIKLPKYSLFELENGRKRMLASAKQLQKGNELALPSKYVNFLYLASHYEKLKGSPEDNEQKQLFVEQHKHYLDEIIEQISEFSKRVILADANLDKVLSAYNKHRDKPIREQAENIIHLFTLTNLGAPAAFKYFDTTIDRKQYRSTKEVLDATLIHQSITGLYETRIDLSQLGGD

SEQ ID NO: 8 - protein, 1368 aa, synthetic construct
  REGION 1..1368: note = Description of Artificial Sequence: Synthetic polypeptide
MDKKYSIGLAIGTNSVGWAVITDEYKVPSKKFKVLGNTDRHSIKKNLIGALLFDSGETAERTRLKRTARRRYTRRKNRICYLQEIFSNEMAKVDDSFFHRLEESFLVEEDKKHERHPIFGNIVDEVAYHEKYPTIYHLRKKLVDSTDKADLRLIYLALAHMIKFRGHFLIEGDLNPDNSDVDKLFIQLVQTYNQLFEENPINASGVDAKAILSARLSKSRRLENLIAQLPGEKKNGLFGNLIALSLGLTPNFKSNFDLAEDAKLQLSKDTYDDDLDNLLAQIGDQYADLFLAAKNLSDAILLSDILRVNTEITKAPLSASMIKRYDEHHQDLTLLKALVRQQLPEKYKEIFFDQSKNGYAGYIDGGASQEEFYKFIKPILEKMDGTEELLVKLNREDLLRKQRTFDNGSIPHQIHLGELHAILRRQEDFYPFLKDNREKIEKILTFRIPYYVGPLARGNSRFAWMTRKSEETITPWNFEEVVDKGASAQSFIERMTNFDKNLPNEKVLPKHSLLYEYFTVYNELTKVKYVTEGMRKPAFLSGEQKKAIVDLLFKTNRKVTVKQLKEDYFKKIECFDSVEISGVEDRFNASLGTYHDLLKIIKDKDFLDNEENEDILEDIVLTLTLFEDREMIEERLKTYAHLFDDKVMKQLKRRRYTGWGRLSRKLINGIRDKQSGKTILDFLKSDGFANRNFMQLIHDDSLTFKEDIQKAQVSGQGDSLHEHIANLAGSPAIKKGILQTVKVVDELVKVMGRHKPENIVIEMARENQTTQKGQKNSRERMKRIEEGIKELGSQILKEHPVENTQLQNEKLYLYYLQNGRDMYVDQELDINRLSDYDVDAIVPQSFLKDDSIDNKVLTRSDKNRGKSDNVPSEEVVKKMKNYWRQLLNAKLITQRKFDNLTKAERGGLSELDKAGFIKRQLVETRQITKHVAQILDSRMNTKYDENDKLIREVKVITLKSKLVSDFRKDFQFYKVREINNYHHAHDAYLNAVVGTALIKKYPKLESEFVYGDYKVYDVRKMIAKSEQEIGKATAKYFFYSNIMNFFKTEITLANGEIRKRPLIETNGETGEIVWDKGRDFATVRKVLSMPQVNIVKKTEVQTGGFSKESIRPKRNSDKLIARKKDWDPKKYGGFLWPTVAYSVLVVAKVEKGKSKKLKSVKELLGITIMERSSFEKNPIDFLEAKGYKEVKKDLIIKLPKYSLFELENGRKRMLASAKQLQKGNELALPSKYVNFLYLASHYEKLKGSPEDNEQKQLFVEQHKHYLDEIIEQISEFSKRVILADANLDKVLSAYNKHRDKPIREQAENIIHLFTLTRLGAPRAFKYFDTTIDPKQYRSTKEVLDATLIHQSITGLYETRIDLSQLGGD

SEQ ID NO: 9 - protein, 1053 aa, Staphylococcus aureus
MKRNYILGLDIGITSVGYGIIDYETRDVIDAGVRLFKEANVENNEGRRSKRGARRLKRRRRHRIQRVKKLLFDYNLLTDHSELSGINPYEARVKGLSQKLSEEEFSAALLHLAKRRGVHNVNEVEEDTGNELSTKEQISRNSKALEEKYVAELQLERLKKDGEVRGSINRFKTSDYVKEAKQLLKVQKAYHQLDQSFIDTYIDLLETRRTYYEGPGEGSPFGWKDIKEWYEMLMGHCTYFPEELRSVKYAYNADLYNALNDLNNLVITRDENEKLEYYEKFQIIENVFKQKKKPTLKQIAKEILVNEEDIKGYRVTSTGKPEFTNLKVYHDIKDITARKEIIENAELLDQIAKILTIYQSSEDIQEELTNLNSELTQEEIEQISNLKGYTGTHNLSLKAINLILDELWHTNDNQIAIFNRLKLVPKKVDLSQQKEIPTTLVDDFILSPVVKRSFIQSIKVINAIIKKYGLPNDIIIELAREKNSKDAQKMINEMQKRNRQTNERIEEIIRTTGKENAKYLIEKIKLHDMQEGKCLYSLEAIPLEDLLNNPFNYEVDHIIPRSVSFDNSFNNKVLVKQEEASKKGNRTPFQYLSSSDSKISYETFKKHILNLAKGKGRISKTKKEYLLEERDINRFSVQKDFINRNLVDTRYATRGLMNLLRSYFRVNNLDVKVKSINGGFTSFLRRKWKFKKERNKGYKHHAEDALIIANADFIFKEWKKLDKAKKVMENQMFEEKQAESMPEIETEQEYKEIFITPHQIKHIKDFKDYKYSHRVDKKPNRELINDTLYSTRKDDKGNTLIVNNLNGLYDKDNDKLKKLINKSPEKLLMYHHDPQTYQKLKLIMEQYGDEKNPLYKYYEETGNYLTKYSKKDNGPVIKKIKYYGNKLNAHLDITDDYPNSRNKVVKLSLKPYRFDVYLDNGVYKFVTVKNLDVIKKENYYEVNSKAYEEAKKLKKISNQAEFIASFYNNDLIKINGELYRVIGVNNDLLNRIEVNMIDITYREYLENMNDKRPPRIIKTIASKTQSIKKYSTDILGNLYEVKSKKHPQIIKKG

SEQ ID NO: 10 - protein, 1053 aa, synthetic construct
  REGION 1..1053: note = Description of Artificial Sequence: Synthetic polypeptide
MKRNYILGLAIGITSVGYGIIDYETRDVIDAGVRLFKEANVENNEGRRSKRGARRLKRRRRHRIQRVKKLLFDYNLLTDHSELSGINPYEARVKGLSQKLSEEEFSAALLHLAKRRGVHNVNEVEEDTGNELSTKEQISRNSKALEEKYVAELQLERLKKDGEVRGSINRFKTSDYVKEAKQLLKVQKAYHQLDQSFIDTYIDLLETRRTYYEGPGEGSPFGWKDIKEWYEMLMGHCTYFPEELRSVKYAYNADLYNALNDLNNLVITRDENEKLEYYEKFQIIENVFKQKKKPTLKQIAKEILVNEEDIKGYRVTSTGKPEFTNLKVYHDIKDITARKEIIENAELLDQIAKILTIYQSSEDIQEELTNLNSELTQEEIEQISNLKGYTGTHNLSLKAINLILDELWHTNDNQIAIFNRLKLVPKKVDLSQQKEIPTTLVDDFILSPVVKRSFIQSIKVINAIIKKYGLPNDIIIELAREKNSKDAQKMINEMQKRNRQTNERIEEIIRTTGKENAKYLIEKIKLHDMQEGKCLYSLEAIPLEDLLNNPFNYEVDHIIPRSVSFDNSFNNKVLVKQEEASKKGNRTPFQYLSSSDSKISYETFKKHILNLAKGKGRISKTKKEYLLEERDINRFSVQKDFINRNLVDTRYATRGLMNLLRSYFRVNNLDVKVKSINGGFTSFLRRKWKFKKERNKGYKHHAEDALIIANADFIFKEWKKLDKAKKVMENQMFEEKQAESMPEIETEQEYKEIFITPHQIKHIKDFKDYKYSHRVDKKPNRKLINDTLYSTRKDDKGNTLIVNNLNGLYDKDNDKLKKLINKSPEKLLMYHHDPQTYQKLKLIMEQYGDEKNPLYKYYEETGNYLTKYSKKDNGPVIKKIKYYGNKLNAHLDITDDYPNSRNKVVKLSLKPYRFDVYLDNGVYKFVTVKNLDVIKKENYYEVNSKCYEEAKKLKKISNQAEFIASFYKNDLIKINGELYRVIGVNNDLLNRIEVNMIDITYREYLENMNDKRPPHIIKTIASKTQSIKKYSTDILGNLYEVKSKKHPQIIKKG

SEQ ID NO: 11 - protein, 1082 aa, synthetic construct
  REGION 1..1082: note = Description of Artificial Sequence: Synthetic polypeptide
MAAFKPNSINYILGLAIGIASVGWAMVEIDEEENPIRLIDLGVRVFERAEVPKTGDSLAMARRLARSVRRLTRRRAHRLLRTRRLLKREGVLQAANFDENGLIKSLPNTPWQLRAAALDRKLTPLEWSAVLLHLIKHRGYLSQRKNEGETADKELGALLKGVAGNAHALQTGDFRTPAELALNKFEKESGHIRNQRSDYSHTFSRKDLQAELILLFEKQKEFGNPHVSGGLKEGIETLLMTQRPALSGDAVQKMLGHCTFEPAEPKAAKNTYTAERFIWLTKLNNLRILEQGSERPLTDTERATLMDEPYRKSKLTYAQARKLLGLEDTAFFKGLRYGKDNAEASTLMEMKAYHAISRALEKEGLKDKKSPLNLSPELQDEIGTAFSLFKTDEDITGRLKDRIQPEILEALLKHISFDKFVQISLKALRRIVPLMEQGKRYDEACAEIYGDHYGKKNTEEKIYLPPIPADEIRNPVVLRALSQARKVINGVVRRYGSPARIHIETAREVGKSFKDRKEIEKRQEENRKDREKAAAKFREYFPNFVGEPKSKDILKLRLYEQQHGKCLYSGKEINLGRLNEKGYVEIDAALPFSRTWDDSFNNKVLVLGSENQNKGNQTPYEYFNGKDNSREWQEFKARVETSRFPRSKKQRILLQKFDEDGFKERNLNDTRYVNRFLCQFVADRMRLTGKGKKRVFASNGQITNLLRGFWGLRKVRAENDRHHALDAVVVACSTVAMQQKITRFVRYKEMNAFDGKTIDKETGEVLHQKTHFPQPWEFFAQEVMIRVFGKPDGKPEFEEADTLEKLRTLLAEKLSSRPEAVHEYVTPLFVSRAPNRKMSGQGHMETVKSAKRLDEGVSVLRVPLTQLKLKDLEKMVNREREPKLYEALKARLEAHKDDPAKAFAEPFYKYDKAGNRTQQVKAVRVEQVQKTGVWVRNHNGIADNATMVRVDVFEKGDKYYLVPIYSWQVAKGILPDRAVVQGKDEEDWQLIDDSFNFKFSLHPNDLVEVITKKARMFGYFASCHRGTGNINIRIHDLDHKIGKNGILEGIGVKTALSFQKYQIDELGKEIRPCRLKKRPPVR

SEQ ID NO: 12 - protein, 984 aa, synthetic construct
  REGION 1..984: note = Description of Artificial Sequence: Synthetic polypeptide
MARILAFAIGISSIGWAFSENDELKDCGVRIFTKVENPKTGESLALPRRLARSARKRLARRKARLNHLKHLIANEFKLNYEDYQSFDESLAKAYKGSLISPYELRFRALNELLSKQDFARVILHIAKRRGYDDIKNSDDKEKGAILKAIKQNEEKLANYQSVGEYLYKEYFQKFKENSKEFTNVRNKKESYERCIAQSFLKDELKLIFKKQREFGFSFSKKFEEEVLSVAFYKRALKDFSHLVGNCSFFTDEKRAPKNSPLAFMFVALTRIINLLNNLKNTEGILYTKDDLNALLNEVLKNGTLTYKQTKKLLGLSDDYEFKGEKGTYFIEFKKYKEFIKALGEHNLSQDDLNEIAKDITLIKDEIKLKKALAKYDLNQNQIDSLSKLEFKDHLNISFKALKLVTPLMLEGKKYDEACNELNLKVAINEDKKDFLPAFNETYYKDEVTNPVVLRAIKEYRKVLNALLKKYGKVHKINIELAREVGKNHSQRAKIEKEQNENYKAKKDAELECEKLGLKINSKNILKLRLFKEQKEFCAYSGEKIKISDLQDEKMLEIDAIYPYSRSFDDSYMNKVLVFTKQNQEKLNQTPFEAFGNDSAKWQKIEVLAKNLPTKKQKRILDKNYKDKEQKNFKDRNLNDTRYIARLVLNYTKDYLDFLPLSDDENTKLNDTQKGSKVHVEAKSGMLTSALRHTWGFSAKDRNNHLHHAIDAVIIAYANNSIVKAFSDFKKEQESNSAELYAKKISELDYKNKRKFFEPFSGFRQKVLDKIDEIFVSKPERKKPSGALHEETFRKEEEFYQSYGGKEGVLKALELGKIRKVNGKIVKNGDMFRVDIFKHKKTNKFYAVPIYTMDFALKVLPNKAVARSKKGEIKDWILMDENYEFCFSLYKDSLILIQTKDMQEPEFVYYNAFTSSTVSLIVSKHDNKFETLSKNQKILFKNANEKEVIAKSIGIQNLKVFEKYIVSALGEVTKAEFRQREDFKK

SEQ ID NO: 13 - protein, 1122 aa, synthetic construct
  REGION 1..1122: note = Description of Artificial Sequence: Synthetic polypeptide
MGSDLVLGLAIGIGSVGVGILNKVTGEIIHKNSRIFPAAQAENNLVRRTNRQGRRLARRKKHRRVRLNRLFEESGLITDFTKISINLNPYQLRVKGLTDELSNEELFIALKNMVKHRGISYLDDASDDGNSSVGDYAQIVKENSKQLETKTPGQIQLERYQTYGQLRGDFTVEKDGKKHRLINVFPTSAYRSEALRILQTQQEFNPQITDEFINRYLEILTGKRKYYHGPGNEKSRTDYGRYRTSGETLDNIFGILIGKCTFYPDEFRAAKASYTAQEFNLLNDLNNLTVPTETKKLSKEQKNQIINYVKNEKAMGPAKLFKYIAKLLSCDVADIKGYRIDKSGKAEIHTFEAYRKMKTLETLDIEQMDRETLDKLAYVLTLNTEREGIQEALEHEFADGSFSQKQVDELVQFRKANSSIFGKGWHNFSVKLMMELIPELYETSEEQMTILTRLGKQKTTSSSNKTKYIDEKLLTEEIYNPVVAKSVRQAIKIVNAAIKEYGDFDNIVIEMARETNEDDEKKAIQKIQKANKDEKDAAMLKAANQYNGKAELPHSVFHGHKQLATKIRLWHQQGERCLYTGKTISIHDLINNSNQFEVDAILPLSITFDDSLANKVLVYATANQEKGQRTPYQALDSMDDAWSFRELKAFVRESKTLSNKKKEYLLTEEDISKFDVRKKFIERNLVDTRYASRVVLNALQEHFRAHKIDTKVSVVRGQFTSQLRRHWGIEKTRDTYHHHAVDALIIAASSQLNLWKKQKNTLVSYSEDQLLDIETGELISDDEYKESVFKAPYQHFVDTLKSKEFEDSILFSYQVDSKFNRKISDATIYATRQAKVGKDKADETYVLGKIKDIYTQDGYDAFMKIYKKDKSKFLMYRHDPQTFEKVIEPILENYPNKQINEKGKEVPCNPFLKYKEEHGYIRKYSKKGNGPEIKSLKYYDSKLGNHIDITPKDSNNKVVLQSVSPWRADVYFNKTTGKYEILGLKYADLQFEKGTGTYKISQEKYNDIKKKEGVDSDSEFKFTLYKNDLLLVKDTETKEQQLFRFLSRTMPKQKHYVELKPYDKQKFEGGEALIKVLGNVANSGQCKKGLGKSNISIYKVRTDVLGNQHIIKNEGDKPKLDF

SEQ ID NO: 14 - protein, 1388 aa, synthetic construct
  REGION 1..1388: note = Description of Artificial Sequence: Synthetic polypeptide
MTKPYSIGLAIGTNSVGWAVITDNYKVPSKKMKVLGNTSKKYIKKNLLGVLLFDSGITAEGRRLKRTARRRYTRRRNRILYLQEIFSTEMATLDDAFFQRLDDSFLVPDDKRDSKYPIFGNLVEEKVYHDEFPTIYHLRKYLADSTKKADLRLVYLALAHMIKYRGHFLIEGEFNSKNNDIQKNFQDFLDTYNAIFESDLSLENSKQLEEIVKDKISKLEKKDRILKLFPGEKNSGIFSEFLKLIVGNQADFRKCFNLDEKASLHFSKESYDEDLETLLGYIGDDYSDVFLKAKKLYDAILLSGFLTVTDNETEAPLSSAMIKRYNEHKEDLALLKEYIRNISLKTYNEVFKDDTKNGYAGYIDGKTNQEDFYVYLKNLLAEFEGADYFLEKIDREDFLRKQRTFDNGSIPYQIHLQEMRAILDKQAKFYPFLAKNKERIEKILTFRIPYYVGPLARGNSDFAWSIRKRNEKITPWNFEDVIDKESSAEAFINRMTSFDLYLPEEKVLPKHSLLYETFNVYNELTKVRFIAESMRDYQFLDSKQKKDIVRLYFKDKRKVTDKDIIEYLHAIYGYDGIELKGIEKQFNSSLSTYHDLLNIINDKEFLDDSSNEAIIEEIIHTLTIFEDREMIKQRLSKFENIFDKSVLKKLSRRHYTGWGKLSAKLINGIRDEKSGNTILDYLIDDGISNRNFMQLIHDDALSFKKKIQKAQIIGDEDKGNIKEVVKSLPGSPAIKKGILQSIKIVDELVKVMGGRKPESIVVEMARENQYTNQGKSNSQQRLKRLEKSLKELGSKILKENIPAKLSKIDNNALQNDRLYLYYLQNGKDMYTGDDLDIDRLSNYDIDHIIPQAFLKDNSIDNKVLVSSASARGKSDDFPSLEVVKKRKTFWYQLLKSKLISQRKFDNLTKAERGGLLPEDKAGFIQRQLVETRQITKHVARLLDEKFNNKKDENNRAVRTVKIITLKSTLVSQFRKDFELYKVREINDFHHAHDAYLNAVIASALLKKYPKLEPEFVYGDYPKYNSFRERKSATEKVYFYSNIMNIFKKSISLADGRVIERPLIEVNEETGESVWNKESDLATVRRVLSYPQVNVVKKVEEQNHGLDRGKPKGLFNANLSSKPKPNSNENLVGAKEYLDPKKYGGYAGISNSFAVLVKGTIEKGAKKKITNVLEFQGISILDRINYRKDKLNFLLEKGYKDIELIIELPKYSLFELSDGSRRMLASILSTNNKRGEIHKGNQIFLSQKFVKLLYHAKRISNTINENHRKYVENHKKEFEELFYYILEFNENYVGAKKNGKLLNSAFQSWQNHSIDELCSSFIGPTGSERKGLFELTSRGSAADFEFLGVKIPRYRDYTPSSLLKDATLIHQSVTGLYETRIDLAKLGEG

SEQ ID NO: 15 - protein, 1300 aa, Francisella tularensis
MSIYQEFVNKYSLSKTLRFELIPQGKTLENIKARGLILDDEKRAKDYKKAKQIIDKYHQFFIEEILSSVCISEDLLQNYSDVYFKLKKSDDDNLQKDFKSAKDTIKKQISEYIKDSEKFKNLFNQNLIDAKKGQESDLILWLKQSKDNGIELFKANSDITDIDEALEIIKSFKGWTTYFKGFHENRKNVYSSNDIPTSIIYRIVDDNLPKFLENKAKYESLKDKAPEAINYEQIKKDLAEELTFDIDYKTSEVNQRVFSLDEVFEIANFNNYLNQSGITKFNTIIGGKFVNGENTKRKGINEYINLYSQQINDKTLKKYKMSVLFKQILSDTESKSFVIDKLEDDSDVVTTMQSFYEQIAAFKTVEEKSIKETLSLLFDDLKAQKLDLSKIYFKNDKSLTDLSQQVFDDYSVIGTAVLEYITQQIAPKNLDNPSKKEQELIAKKTEKAKYLSLETIKLALEEFNKHRDIDKQCRFEEILANFAAIPMIFDEIAQNKDNLAQISIKYQNQGKKDLLQASAEDDVKAIKDLLDQTNNLLHKLKIFHISQSEDKANILDKDEHFYLVFEECYFELANIVPLYNKIRNYITQKPYSDEKFKLNFENSTLANGWDKNKEPDNTAILFIKDDKYYLGVMNKKNNKIFDDKAIKENKGEGYKKIVYKLLPGANKMLPKVFFSAKSIKFYNPSEDILRIRNHSTHTKNGSPQKGYEKFEFNIEDCRKFIDFYKQSISKHPEWKDFGFRFSDTQRYNSIDEFYREVENQGYKLTFENISESYIDSVVNQGKLYLFQIYNKDFSAYSKGRPNLHTLYWKALFDERNLQDVVYKLNGEAELFYRKQSIPKKITHPAKEAIANKNKDNPKKESVFEYDLIKDKRFTEDKFFFHCPITINFKSSGANKFNDEINLLLKEKANDVHILSIDRGERHLAYYTLVDGKGNIIKQDTFNIIGNDRMKTNYHDKLAAIEKDRDSARKDWKKINNIKEMKEGYLSQVVHEIAKLVIEYNAIVVFEDLNFGFKRGRFKVEKQVYQKLEKMLIEKLNYLVFKDNEFDKTGGVLRAYQLTAPFETFKKMGKQTGIIYYVPAGFTSKICPVTGFVNQLYPKYESVSKSQEFFSKFDKICYNLDKGYFEFSFDYKNFGDKAAKGKWTIASFGSRLINFRNSDKNHNWDTREVYPTKELEKLLKDYSIEYGHGECIKAAICGESDKKFFAKLTSVLNTILQMRNSKTGTELDYLISPVADVNGNFFDSRQAPKNMPQDADANGAYHIGLKGLMLLGRIKNNQEGKKLNLVIKNEEYFEFVQNRNN

SEQ ID NO: 16 - protein, 1300 aa, synthetic construct
  REGION 1..1300: note = Description of Artificial Sequence: Synthetic polypeptide
MSIYQEFVNKYSLSKTLRFELIPQGKTLENIKARGLILDDEKRAKDYKKAKQIIDKYHQFFIEEILSSVCISEDLLQNYSDVYFKLKKSDDDNLQKDFKSAKDTIKKQISEYIKDSEKFKNLFNQNLIDAKKGQESDLILWLKQSKDNGIELFKANSDITDIDEALEIIKSFKGWTTYFKGFHENRKNVYSSNDIPTSIIYRIVDDNLPKFLENKAKYESLKDKAPEAINYEQIKKDLAEELTFDIDYKTSEVNQRVFSLDEVFEIANFNNYLNQSGITKFNTIIGGKFVNGENTKRKGINEYINLYSQQINDKTLKKYKMSVLFKQILSDTESKSFVIDKLEDDSDVVTTMQSFYEQIAAFKTVEEKSIKETLSLLFDDLKAQKLDLSKIYFKNDKSLTDLSQQVFDDYSVIGTAVLEYITQQIAPKNLDNPSKKEQELIAKKTEKAKYLSLETIKLALEEFNKHRDIDKQCRFEEILANFAAIPMIFDEIAQNKDNLAQISIKYQNQGKKDLLQASAEDDVKAIKDLLDQTNNLLHKLKIFHISQSEDKANILDKDEHFYLVFEECYFELANIVPLYNKIRNYITQKPYSDEKFKLNFENSTLANGWDKNKEPDNTAILFIKDDKYYLGVMNKKNNKIFDDKAIKENKGEGYKKIVYKLLPGANKMLPKVFFSAKSIKFYNPSEDILRIRNHSTHTKNGSPQKGYEKFEFNIEDCRKFIDFYKQSISKHPEWKDFGFRFSDTQRYNSIDEFYREVENQGYKLTFENISESYIDSVVNQGKLYLFQIYNKDFSAYSKGRPNLHTLYWKALFDERNLQDVVYKLNGEAELFYRKQSIPKKITHPAKEAIANKNKDNPKKESVFEYDLIKDKRFTEDKFFFHCPITINFKSSGANKFNDEINLLLKEKANDVHILSIARGERHLAYYTLVDGKGNIIKQDTFNIIGNDRMKTNYHDKLAAIEKDRDSARKDWKKINNIKEMKEGYLSQVVHEIAKLVIEYNAIVVFEDLNFGFKRGRFKVEKQVYQKLEKMLIEKLNYLVFKDNEFDKTGGVLRAYQLTAPFETFKKMGKQTGIIYYVPAGFTSKICPVTGFVNQLYPKYESVSKSQEFFSKFDKICYNLDKGYFEFSFDYKNFGDKAAKGKWTIASFGSRLINFRNSDKNHNWDTREVYPTKELEKLLKDYSIEYGHGECIKAAICGESDKKFFAKLTSVLNTILQMRNSKTGTELDYLISPVADVNGNFFDSRQAPKNMPQDADANGAYHIGLKGLMLLGRIKNNQEGKKLNLVIKNEEYFEFVQNRNN

SEQ ID NO: 17 - protein, 1228 aa, synthetic construct
  REGION 1..1228: note = Description of Artificial Sequence: Synthetic polypeptide
MSKLEKFTNCYSLSKTLRFKAIPVGKTQENIDNKRLLVEDEKRAEDYKGVKKLLDRYYLSFINDVLHSIKLKNLNNYISLFRKKTRTEKENKELENLEINLRKEIAKAFKGNEGYKSLFKKDIIETILPEFLDDKDEIALVNSFNGFTTAFTGFFDNRENMFSEEAKSTSIAFRCINENLTRYISNMDIFEKVDAIFDKHEVQEIKEKILNSDYDVEDFFEGEFFNFVLTQEGIDVYNAIIGGFVTESGEKIKGLNEYINLYNQKTKQKLPKFKPLYKQVLSDRESLSFYGEGYTSDEEVLEVFRNTLNKNSEIFSSIKKLEKLFKNFDEYSSAGIFVKNGPAISTISKDIFGEWNVIRDKWNAEYDDIHLKKKAVVTEKYEDDRRKSFKKIGSFSLEQLQEYADADLSVVEKLKEIIIQKVDEIYKVYGSSEKLFDADFVLEKSLKKNDAVVAIMKDLLDSVKSFENYIKAFFGEGKETNRDESFYGDFVLAYDILLKVDHIYDAIRNYVTQKPYSKDKFKLYFQNPQFMGGWDKDKETDYRATILRYGSKYYLAIMDKKYAKCLQKIDKDDVNGNYEKINYKLLPGPNKMLPKVFFSKKWMAYYNPSEDIQKIYKNGTFKKGDMFNLNDCHKLIDFFKDSISRYPKWSNAYDFNFSETEKYKDIAGFYREVEEQGYKVSFESASKKEVDKLVEEGKLYMFQIYNKDFSDKSHGTPNLHTMYFKLLFDENNHGQIRLSGGAELFMRRASLKKEELVVHPANSPIANKNPDNPKKTTTLSYDVYKDKRFSEDQYELHIPIAINKCPKNIFKINTEVRVLLKHDDNPYVIGIARGERNLLYIVVVDGKGNIVEQYSLNEIINNFNGIRIKTDYHSLLDKKEKERFEARQNWTSIENIKELKAGYISQVVHKICELVEKYDAVIALEDLNSGFKNSRVKVEKQVYQKFEKMLIDKLNYMVDKKSNPCATGGALKGYQITNKFESFKSMSTQNGFIFYIPAWLTSKIDPSTGFVNLLKTKYTSIADSKKFISSFDRIMYVPEEDLFEFALDYKNFSRTDADYIKKWKLYSYGNRIRIFRNPKKNNVFDWEEVCLTSAYKELFNKYGINYQQGDIRALLCEQSDKAFYSSFMALMSLMLQMRNSITGRTDVDFLISPVKNSDGIFYDSRNYEAQENAILPKNADANGAYNIARKVLWAIGQFKKAEDEKLDKVKIAISNKEWLEYAQTSVKH

SEQ ID NO: 18 - protein, 1307 aa, synthetic construct
  REGION 1..1307: note = Description of Artificial Sequence: Synthetic polypeptide
MTQFEGFTNLYQVSKTLRFELIPQGKTLKHIQEQGFIEEDKARNDHYKELKPIIDRIYKTYADQCLQLVQLDWENLSAAIDSYRKEKTEETRNALIEEQATYRNAIHDYFIGRTDNLTDAINKRHAEIYKGLFKAELFNGKVLKQLGTVTTTEHENALLRSFDKFTTYFSGFYENRKNVFSAEDISTAIPHRIVQDNFPKFKENCHIFTRLITAVPSLREHFENVKKAIGIFVSTSIEEVFSFPFYNQLLTQTQIDLYNQLLGGISREAGTEKIKGLNEVLNLAIQKNDETAHIIASLPHRFIPLFKQILSDRNTLSFILEEFKSDEEVIQSFCKYKTLLRNENVLETAEALFNELNSIDLTHIFISHKKLETISSALCDHWDTLRNALYERRISELTGKITKSAKEKVQRSLKHEDINLQEIISAAGKELSEAFKQKTSEILSHAHAALDQPLPTTLKKQEEKEILKSQLDSLLGLYHLLDWFAVDESNEVDPEFSARLTGIKLEMEPSLSFYNKARNYATKKPYSVEKFKLNFQMPTLASGWDVNKEKNNGAILFVKNGLYYLGIMPKQKGRYKALSFEPTEKTSEGFDKMYYDYFPDAAKMIPKCSTQLKAVTAHFQTHTTPILLSNNFIEPLEITKEIYDLNNPEKEPKKFQTAYAKKTGDQKGYREALCKWIDFTRDFLSKYTKTTSIDLSSLRPSSQYKDLGEYYAELNPLLYHISFQRIAEKEIMDAVETGKLYLFQIYNKDFAKGHHGKPNLHTLYWTGLFSPENLAKTSIKLNGQAELFYRPKSRMKRMAHRLGEKMLNKKLKDQKTPIPDTLYQELYDYVNHRLSHDLSDEARALLPNVITKEVSHEIIKDRRFTSDKFFFHVPITLNYQAANSPSKFNQRVNAYLKEHPETPIIGIARGERNLIYITVIDSTGKILEQRSLNTIQQFDYQKKLDNREKERVAARQAWSVVGTIKDLKQGYLSQVIHEIVDLMIHYQAVVVLENLNFGFKSKRTGIAEKAVYQQFEKMLIDKLNCLVLKDYPAEKVGGVLNPYQLTDQFTSFAKMGTQSGFLFYVPAPYTSKIDPLTGFVDPFVWKTIKNHESRKHFLEGFDFLHYDVKTGDFILHFKMNRNLSFQRGLPGFMPAWDIVFEKNETQFDAKGTPFIAGKRIVPVIENHRFTGRYRDLYPANELIALLEEKGIVFRDGSNILPKLLENDDSHAIDTMVALIRSVLQMRNSNAATGEDYINSPVRDLNGVCFDSRFQNPEWPMDADANGAYHIALKGQLLLNHLKESKDLKLQNGISNQDWLAYIQELRN

SEQ ID NO: 19 - protein, 1307 aa, synthetic construct
  REGION 1..1307: note = Description of Artificial Sequence: Synthetic polypeptide
MTQFEGFTNLYQVSKTLRFELIPQGKTLKHIQEQGFIEEDKARNDHYKELKPIIDRIYKTYADQCLQLVQLDWENLSAAIDSYRKEKTEETRNALIEEQATYRNAIHDYFIGRTDNLTDAINKRHAEIYKGLFKAELFNGKVLKQLGTVTTTEHENALLRSFDKFTTYFSGFYRNRKNVFSAEDISTAIPHRIVQDNFPKFKENCHIFTRLITAVPSLREHFENVKKAIGIFVSTSIEEVFSFPFYNQLLTQTQIDLYNQLLGGISREAGTEKIKGLNEVLNLAIQKNDETAHIIASLPHRFIPLFKQILSDRNTLSFILEEFKSDEEVIQSFCKYKTLLRNENVLETAEALFNELNSIDLTHIFISHKKLETISSALCDHWDTLRNALYERRISELTGKITKSAKEKVQRSLKHEDINLQEIISAAGKELSEAFKQKTSEILSHAHAALDQPLPTTLKKQEEKEILKSQLDSLLGLYHLLDWFAVDESNEVDPEFSARLTGIKLEMEPSLSFYNKARNYATKKPYSVEKFKLNFQMPTLARGWDVNREKNNGAILFVKNGLYYLGIMPKQKGRYKALSFEPTEKTSEGFDKMYYDYFPDAAKMIPKCSTQLKAVTAHFQTHTTPILLSNNFIEPLEITKEIYDLNNPEKEPKKFQTAYAKKTGDQKGYREALCKWIDFTRDFLSKYTKTTSIDLSSLRPSSQYKDLGEYYAELNPLLYHISFQRIAEKEIMDAVETGKLYLFQIYNKDFAKGHHGKPNLHTLYWTGLFSPENLAKTSIKLNGQAELFYRPKSRMKRMAHRLGEKMLNKKLKDQKTPIPDTLYQELYDYVNHRLSHDLSDEARALLPNVITKEVSHEIIKDRRFTSDKFFFHVPITLNYQAANSPSKFNQRVNAYLKEHPETPIIGIARGERNLIYITVIDSTGKILEQRSLNTIQQFDYQKKLDNREKERVAARQAWSVVGTIKDLKQGYLSQVIHEIVDLMIHYQAVVVLENLNFGFKSKRTGIAEKAVYQQFEKMLIDKLNCLVLKDYPAEKVGGVLNPYQLTDQFTSFAKMGTQSGFLFYVPAPYTSKIDPLTGFVDPFVWKTIKNHESRKHFLEGFDFLHYDVKTGDFILHFKMNRNLSFQRGLPGFMPAWDIVFEKNETQFDAKGTPFIAGKRIVPVIENHRFTGRYRDLYPANELIALLEEKGIVFRDGSNILPKLLENDDSHAIDTMVALIRSVLQMRNSNAATGEDYINSPVRDLNGVCFDSRFQNPEWPMDADANGAYHIALKGQLLLNHLKESKDLKLQNGISNQDWLAYIQELRN

SEQ ID NO: 20 - protein, 1307 aa, synthetic construct
  REGION 1..1307: note = Description of Artificial Sequence: Synthetic polypeptide
MTQFEGFTNLYQVSKTLRFELIPQGKTLKHIQEQGFIEEDKARNDHYKELKPIIDRIYKTYADQCLQLVQLDWENLSAAIDSYRKEKTEETRNALIEEQATYRNAIHDYFIGRTDNLTDAINKRHAEIYKGLFKAELFNGKVLKQLGTVTTTEHENALLRSFDKFTTYFSGFYRNRKNVFSAEDISTAIPHRIVQDNFPKFKENCHIFTRLITAVPSLREHFENVKKAIGIFVSTSIEEVFSFPFYNQLLTQTQIDLYNQLLGGISREAGTEKIKGLNEVLALAIQKNDETAHIIASLPHRFIPLFKQILSDRNTLSFILEEFKSDEEVIQSFCKYKTLLRNENVLETAEALFNELNSIDLTHIFISHKKLETISSALCDHWDTLRNALYERRISELTGKITKSAKEKVQRSLKHEDINLQEIISAAGKELSEAFKQKTSEILSHAHAALDQPLPTTLKKQEEKEILKSQLDSLLGLYHLLDWFAVDESNEVDPEFSARLTGIKLEMEPSLSFYNKARNYATKKPYSVEKFKLNFQMPTLARGWDVNREKNNGAILFVKNGLYYLGIMPKQKGRYKALSFEPTEKTSEGFDKMYYDYFPDAAKMIPKCSTQLKAVTAHFQTHTTPILLSNNFIEPLEITKEIYDLNNPEKEPKKFQTAYAKKTGDQKGYREALCKWIDFTRDFLSKYTKTTSIDLSSLRPSSQYKDLGEYYAELNPLLYHISFQRIAEKEIMDAVETGKLYLFQIYNKDFAKGHHGKPNLHTLYWTGLFSPENLAKTSIKLNGQAELFYRPKSRMKRMAHRLGEKMLNKKLKDQKTPIPDTLYQELYDYVNHRLSHDLSDEARALLPNVITKEVSHEIIKDRRFTSDKFFFHVPITLNYQAANSPSKFNQRVNAYLKEHPETPIIGIARGERNLIYITVIDSTGKILEQRSLNTIQQFDYQKKLDNREKERVAARQAWSVVGTIKDLKQGYLSQVIHEIVDLMIHYQAVVVLENLNFGFKSKRTGIAEKAVYQQFEKMLIDKLNCLVLKDYPAEKVGGVLNPYQLTDQFTSFAKMGTQSGFLFYVPAPYTSKIDPLTGFVDPFVWKTIKNHESRKHFLEGFDFLHYDVKTGDFILHFKMNRNLSFQRGLPGFMPAWDIVFEKNETQFDAKGTPFIAGKRIVPVIENHRFTGRYRDLYPANELIALLEEKGIVFRDGSNILPKLLENDDSHAIDTMVALIRSVLQMRNSNAATGEDYINSPVRDLNGVCFDSRFQNPEWPMDADANGAYHIALKGQLLLNHLKESKDLKLQNGISNQDWLAYIQELRN

SEQ ID NO: 21 - protein, 1307 aa, synthetic construct
  REGION 1..1307: note = Description of Artificial Sequence: Synthetic polypeptide
MTQFEGFTNLYQVSKTLRFELIPQGKTLKHIQEQGFIEEDKARNDHYKELKPIIDRIYKTYADQCLQLVQLDWENLSAAIDSYRKEKTEETRNALIEEQATYRNAIHDYFIGRTDNLTDAINKRHAEIYKGLFKAELFNGKVLKQLGTVTTTEHENALLRSFDKFTTYFSGFYENRKNVFSAEDISTAIPHRIVQDNFPKFKENCHIFTRLITAVPSLREHFENVKKAIGIFVSTSIEEVFSFPFYNQLLTQTQIDLYNQLLGGISREAGTEKIKGLNEVLNLAIQKNDETAHIIASLPHRFIPLFKQILSDRNTLSFILEEFKSDEEVIQSFCKYKTLLRNENVLETAEALFNELNSIDLTHIFISHKKLETISSALCDHWDTLRNALYERRISELTGKITKSAKEKVQRSLKHEDINLQEIISAAGKELSEAFKQKTSEILSHAHAALDQPLPTTLKKQEEKEILKSQLDSLLGLYHLLDWFAVDESNEVDPEFSARLTGIKLEMEPSLSFYNKARNYATKKPYSVEKFKLNFQMPTLARGWDVNVEKNRGAILFVKNGLYYLGIMPKQKGRYKALSFEPTEKTSEGFDKMYYDYFPDAAKMIPKCSTQLKAVTAHFQTHTTPILLSNNFIEPLEITKEIYDLNNPEKEPKKFQTAYAKKTGDQKGYREALCKWIDFTRDFLSKYTKTTSIDLSSLRPSSQYKDLGEYYAELNPLLYHISFQRIAEKEIMDAVETGKLYLFQIYNKDFAKGHHGKPNLHTLYWTGLFSPENLAKTSIKLNGQAELFYRPKSRMKRMAHRLGEKMLNKKLKDQKTPIPDTLYQELYDYVNHRLSHDLSDEARALLPNVITKEVSHEIIKDRRFTSDKFFFHVPITLNYQAANSPSKFNQRVNAYLKEHPETPIIGIARGERNLIYITVIDSTGKILEQRSLNTIQQFDYQKKLDNREKERVAARQAWSVVGTIKDLKQGYLSQVIHEIVDLMIHYQAVVVLENLNFGFKSKRTGIAEKAVYQQFEKMLIDKLNCLVLKDYPAEKVGGVLNPYQLTDQFTSFAKMGTQSGFLFYVPAPYTSKIDPLTGFVDPFVWKTIKNHESRKHFLEGFDFLHYDVKTGDFILHFKMNRNLSFQRGLPGFMPAWDIVFEKNETQFDAKGTPFIAGKRIVPVIENHRFTGRYRDLYPANELIALLEEKGIVFRDGSNILPKLLENDDSHAIDTMVALIRSVLQMRNSNAATGEDYINSPVRDLNGVCFDSRFQNPEWPMDADANGAYHIALKGQLLLNHLKESKDLKLQNGISNQDWLAYIQELRN

SEQ ID NO: 22 - protein, 1307 aa, synthetic construct
  REGION 1..1307: note = Description of Artificial Sequence: Synthetic polypeptide
MTQFEGFTNLYQVSKTLRFELIPQGKTLKHIQEQGFIEEDKARNDHYKELKPIIDRIYKTYADQCLQLVQLDWENLSAAIDSYRKEKTEETRNALIEEQATYRNAIHDYFIGRTDNLTDAINKRHAEIYKGLFKAELFNGKVLKQLGTVTTTEHENALLRSFDKFTTYFSGFYENRKNVFSAEDISTAIPHRIVQDNFPKFKENCHIFTRLITAVPSLREHFENVKKAIGIFVSTSIEEVFSFPFYNQLLTQTQIDLYNQLLGGISREAGTEKIKGLNEVLNLAIQKNDETAHIIASLPHRFIPLFKQILSDRNTLSFILEEFKSDEEVIQSFCKYKTLLRNENVLETAEALFNELNSIDLTHIFISHKKLETISSALCDHWDTLRNALYERRISELTGKITKSAKEKVQRSLKHEDINLQEIISAAGKELSEAFKQKTSEILSHAHAALDQPLPTTLKKQEEKEILKSQLDSLLGLYHLLDWFAVDESNEVDPEFSARLTGIKLEMEPSLSFYNKARNYATKKPYSVEKFKLNFQMPTLARGWDVNKEKNNGAILFVKNGLYYLGIMPKQKGRYKALSFEPTEKTSEGFDKMYYDYFPDAAKMIPRCSTQLKAVTAHFQTHTTPILLSNNFIEPLEITKEIYDLNNPEKEPKKFQTAYAKKTGDQKGYREALCKWIDFTRDFLSKYTKTTSIDLSSLRPSSQYKDLGEYYAELNPLLYHISFQRIAEKEIMDAVETGKLYLFQIYNKDFAKGHHGKPNLHTLYWTGLFSPENLAKTSIKLNGQAELFYRPKSRMKRMAHRLGEKMLNKKLKDQKTPIPDTLYQELYDYVNHRLSHDLSDEARALLPNVITKEVSHEIIKDRRFTSDKFFFHVPITLNYQAANSPSKFNQRVNAYLKEHPETPIIGIARGERNLIYITVIDSTGKILEQRSLNTIQQFDYQKKLDNREKERVAARQAWSVVGTIKDLKQGYLSQVIHEIVDLMIHYQAVVVLENLNFGFKSKRTGIAEKAVYQQFEKMLIDKLNCLVLKDYPAEKVGGVLNPYQLTDQFTSFAKMGTQSGFLFYVPAPYTSKIDPLTGFVDPFVWKTIKNHESRKHFLEGFDFLHYDVKTGDFILHFKMNRNLSFQRGLPGFMPAWDIVFEKNETQFDAKGTPFIAGKRIVPVIENHRFTGRYRDLYPANELIALLEEKGIVFRDGSNILPKLLENDDSHAIDTMVALIRSVLQMRNSNAATGEDYINSPVRDLNGVCFDSRFQNPEWPMDADANGAYHIALKGQLLLNHLKESKDLKLQNGISNQDWLAYIQELRN

SEQ ID NO: 23 - protein, 986 aa, synthetic construct
  REGION 1..986: note = Description of Artificial Sequence: Synthetic polypeptide
MEKRINKIRKKLSADNATKPVSRSGPMKTLLVRVMTDDLKKRLEKRRKKPEVMPQVISNNAANNLRMLLDDYTKMKEAILQVYWQEFKDDHVGLMCKFAQPASKKIDQNKLKPEMDEKGNLTTAGFACSQCGQPLFVYKLEQVSEKGKAYTNYFGRCNVAEHEKLILLAQLKPEKDSDEAVTYSLGKFGQRALDFYSIHVTKESTHPVKPLAQIAGNRYASGPVGKALSDACMGTIASFLSKYQDIIIEHQKVVKGNQKRLESLRELAGKENLEYPSVTLPPQPHTKEGVDAYNEVIARVRMWVNLNLWQKLKLSRDDAKPLLRLKGFPSFPVVERRENEVDWWNTINEVKKLIDAKRDMGRVFWSGVTAEKRNTILEGYNYLPNENDHKKREGSLENPKKPAKRQFGDLLLYLEKKYAGDWGKVFDEAWERIDKKIAGLTSHIEREEARNAEDAQSKAVLTDWLRAKASFVLERLKEMDEKEFYACEIQLQKWYGDLRGNPFAVEAENRVVDISGFSIGSDGHSIQYRNLLAWKYLENGKREFYLLMNYGKKGRIRFTDGTDIKKSGKWQGLLYGGGKAKVIDLTFDPDDEQLIILPLAFGTRQGREFIWNDLLSLETGLIKLANGRVIEKTIYNKKIGRDEPALFVALTFERREVVDPSNIKPVNLIGVDRGENIPAVIALTDPEGCPLPEFKDSSGGPTDILRIGEGYKEKQRAIQAAKEVEQRRAGGYSRKFASKSRNLADDMVRNSARDLFYHAVTHDAVLVFENLSRGFGRQGKRTFMTERQYTKMEDWLTAKLAYEGLTSKTYLSKTLAQYTSKTCSNCGFTITTADYDGMLVRLKKTSDGWATTLNNKELKAEGQITYYNRYKRQTVEKELSAELDRLSEESGNNDISKWTKGRRDEALFLLKKRFSHRPVQEQFVCLDCGHEVHADEQAALNIARSWLFLNSNSTEFKSYKSGKQPFVGAWQAFYKRRLKEVWKPNA

SEQ ID NO: 24 - protein, 986 aa, synthetic construct
  REGION 1..986: note = Description of Artificial Sequence: Synthetic polypeptide
MEKRINKIRKKLSADNATKPVSRSGPMKTLLVRVMTDDLKKRLEKRRKKPEVMPQVISNNAANNLRMLLDDYTKMKEAILQVYWQEFKDDHVGLMCKFAQPASKKIDQNKLKPEMDEKGNLTTAGFACSQCGQPLFVYKLEQVSEKGKAYTNYFGRCNVAEHEKLILLAQLKPEKDSDEAVTYSLGKFGQRALDFYSIHVTKESTHPVKPLAQIAGNRYASGPVGKALSDACMGTIASFLSKYQDIIIEHQKVVKGNQKRLESLRELAGKENLEYPSVTLPPQPHTKEGVDAYNEVIARVRMWVNLNLWQKLKLSRDDAKPLLRLKGFPSFPVVERRENEVDWWNTINEVKKLIDAKRDMGRVFWSGVTAEKRNTILEGYNYLPNENDHKKREGSLENPKKPAKRQFGDLLLYLEKKYAGDWGKVFDEAWERIDKKIAGLTSHIEREEARNAEDAQSKAVLTDWLRAKASFVLERLKEMDEKEFYACEIQLQKWYGDLRGNPFAVEAENRVVDISGFSIGSDGHSIQYRNLLAWKYLENGKREFYLLMNYGKKGRIRFTDGTDIKKSGKWQGLLYGGGKAKVIDLTFDPDDEQLIILPLAFGTRQGREFIWNDLLSLETGLIKLANGRVIEKTIYNKKIGRDEPALFVALTFERREVVDPSNIKPVNLIGVARGENIPAVIALTDPEGCPLPEFKDSSGGPTDILRIGEGYKEKQRAIQAAKEVEQRRAGGYSRKFASKSRNLADDMVRNSARDLFYHAVTHDAVLVFANLSRGFGRQGKRTFMTERQYTKMEDWLTAKLAYEGLTSKTYLSKTLAQYTSKTCSNCGFTITTADYDGMLVRLKKTSDGWATTLNNKELKAEGQITYYNRYKRQTVEKELSAELDRLSEESGNNDISKWTKGRRDEALFLLKKRFSHRPVQEQFVCLDCGHEVHAAEQAALNIARSWLFLNSNSTEFKSYKSGKQPFVGAWQAFYKRRLKEVWKPNA

SEQ ID NO: 25 - protein, 1125 aa, synthetic construct
  REGION 1..1125: note = Description of Artificial Sequence: Synthetic polypeptide
MRKKLFKGYILHNKRLVYTGKAAIRSIKYPLVAPNKTALNNLSEKIIYDYEHLFGPLNVASYARNSNRYSLVDFWIDSLRAGVIWQSKSTSLIDLISKLEGSKSPSEKIFEQIDFELKNKLDKEQFKDIILLNTGIRSSSNVRSLRGRFLKCFKEEFRDTEEVIACVDKWSKDLIVEGKSILVSKQFLYWEEEFGIKIFPHFKDNHDLPKLTFFVEPSLEFSPHLPLANCLERLKKFDISRESLLGLDNNFSAFSNYFNELFNLLSRGEIKKIVTAVLAVSKSWENEPELEKRLHFLSEKAKLLGYPKLTSSWADYRMIIGGKIKSWHSNYTEQLIKVREDLKKHQIALDKLQEDLKKVVDSSLREQIEAQREALLPLLDTMLKEKDFSDDLELYRFILSDFKSLLNGSYQRYIQTEEERKEDRDVTKKYKDLYSNLRNIPRFFGESKKEQFNKFINKSLPTIDVGLKILEDIRNALETVSVRKPPSITEEYVTKQLEKLSRKYKINAFNSNRFKQITEQVLRKYNNGELPKISEVFYRYPRESHVAIRILPVKISNPRKDISYLLDKYQISPDWKNSNPGEVVDLIEIYKLTLGWLLSCNKDFSMDFSSYDLKLFPEAASLIKNFGSCLSGYYLSKMIFNCITSEIKGMITLYTRDKFVVRYVTQMIGSNQKFPLLCLVGEKQTKNFSRNWGVLIEEKGDLGEEKNQEKCLIFKDKTDFAKAKEVEIFKNNIWRIRTSKYQIQFLNRLFKKTKEWDLMNLVLSEPSLVLEEEWGVSWDKDKLLPLLKKEKSCEERLYYSLPLNLVPATDYKEQSAEIEQRNTYLGLDVGEFGVAYAVVRIVRDRIELLSWGFLKDPALRKIRERVQDMKKKQVMAVFSSSSTAVARVREMAIHSLRNQIHSIALAYKAKIIYEISISNFETGGNRMAKIYRSIKVSDVYRESGADTLVSEMIWGKKNKQMGNHISSYATSYTCCNCARTPFELVIDNDKEYEKGGDEFIFNVGDEKKVRGFLQKSLLGKTIKGKEVLKSIKEYARPPIREVLLEGEDVEQLLKRRGNSYIYRCPFCGYKTDADIQAALNIACRGYISDNAKDAVKEGERKLDYILEVRKLWEKNGAVLRSAKFL

SEQ ID NO: 26 - protein, 707 aa, synthetic construct
  REGION 1..707: note = Description of Artificial Sequence: Synthetic polypeptide
MADTPTLFTQFLRHHLPGQRFRKDILKQAGRILANKGEDATIAFLRGKSEESPPDFQPPVKCPIIACSRPLTEWPIYQASVAIQGYVYGQSLAEFEASDPGCSKDGLLGWFDKTGVCTDYFSVQGLNLIFQNARKRYIGVQTKVTNRNEKRHKKLKRINAKRIAEGLPELTSDEPESALDETGHLIDPPGLNTNIYCYQQVSPKPLALSEVNQLPTAYAGYSTSGDDPIQPMVTKDRLSISKGQPGYIPEHQRALLSQKKHRRMRGYGLKARALLVIVRIQDDWAVIDLRSLLRNAYWRRIVQTKEPSTITKLLKLVTGDPVLDATRMVATFTYKPGIVQVRSAKCLKNKQGSKLFSERYLNETVSVTSIDLGSNNLVAVATYRLVNGNTPELLQRFTLPSHLVKDFERYKQAHDTLEDSIQKTAVASLPQGQQTEIRMWSMYGFREAQERVCQELGLADGSIPWNVMTATSTILTDLFLARGGDPKKCMFTSEPKKKKNSKQVLYKIRDRAWAKMYRTLLSKETREAWNKALWGLKRGSPDYARLSKRKEELARRCVNYTISTAEKRAQCGRTIVALEDLNIGFFHGRGKQEPGWVGLFTRKKENRWLMQALHKAFLELAHHRGYHVIEVNPAYTSQTCPVCRHCDPDNRDQHNREAFHCIGCGFRGNADLDVATHNIAMVAITGESLKRARGSVASKTPQPLAAE

SEQ ID NO: 27 - protein, 757 aa, synthetic construct
  REGION 1..757: note = Description of Artificial Sequence: Synthetic polypeptide
MPKPAVESEFSKVLKKHFPGERFRSSYMKRGGKILAAQGEEAVVAYLQGKSEEEPPNFQPPAKCHVVTKSRDFAEWPIMKASEAIQRYIYALSTTERAACKPGKSSESHAAWFAATGVSNHGYSHVQGLNLIFDHTLGRYDGVLKKVQLRNEKARARLESINASRADEGLPEIKAEEEEVATNETGHLLQPPGINPSFYVYQTISPQAYRPRDEIVLPPEYAGYVRDPNAPIPLGVVRNRCDIQKGCPGYIPEWQREAGTAISPKTGKAVTVPGLSPKKNKRMRRYWRSEKEKAQDALLVTVRIGTDWVVIDVRGLLRNARWRTIAPKDISLNALLDLFTGDPVIDVRRNIVTFTYTLDACGTYARKWTLKGKQTKATLDKLTATQTVALVAIALGQTNPISAGISRVTQENGALQCEPLDRFTLPDDLLKDISAYRIAWDRNEEELRARSVEALPEAQQAEVRALDGVSKETARTQLCADFGLDPKRLPWDKMSSNTTFISEALLSNSVSRDQVFFTPAPKKGAKKKAPVEVMRKDRTWARAYKPRLSVEAQKLKNEALWALKRTSPEYLKLSRRKEELCRRSINYVIEKTRRRTQCQIVIPVIEDLNVRFFHGSGKRLPGWDNFFTAKKENRWFIQGLHKAFSDLRTHRSFYVFEVRPERTSITCPKCGHCEVGNRDGEAFQCLSCGKTCNADLDVATHNLTQVALTGKTMPKREEPRDAQGTAPARKTKKASKSKAPPAEREDQTPAQEPSQTS

SEQ ID NO: 28 - protein, 426 aa, synthetic construct
  REGION 1..426: note = Description of Artificial Sequence: Synthetic polypeptide
MIKVYRYEIVKPLDLDWKEFGTILRQLQQETRFALNKATQLAWEWMGFSSDYKDNHGEYPKSKDILGYTNVHGYAYHTIKTKAYRLNSGNLSQTIKRATDRFKAYQKEILRGDMSIPSYKRDIPLDLIKENISVNRMNHGDYIASLSLLSNPAKQEMNVKRKISVIIIVRGAGKTIMDRILSGEYQVSASQIIHDDRKNKWYLNISYDFEPQTRVLDLNKIMGIDLGVAVAVYMAFQHTPARYKLEGGEIENFRRQVESRRISMLRQGKYAGGARGGHGRDKRIKPIEQLRDKIANFRDTTNHRYSRYIVDMAIKEGCGTIQMEDLTNIRDIGSRFLQNWTYYDLQQKIIYKAEEAGIKVIKIDPQYTSQRCSECGNIDSGNRIGQAIFKCRACGYEANADYNAARNIAIPNIDKIIAESIKSGGS

SEQ ID NO: 29 - protein, 509 aa, synthetic construct
  REGION 1..509: note = Description of Artificial Sequence: Synthetic polypeptide
NAMIAQKTIKIKLNPTKEQIIKLNSIIEEYIKVSNFTAKKIAEIQESFTDSGLTQGTCSECGKEKTYRKYHLLKKDNKLFCITCYKRKYSQFTLQKVEFQNKTGLRNVAKLPKTYYTNAIRFASDTFSGFDEIIKKKQNRLNSIQNRLNFWKELLYNPSNRNEIKIKVVKYAPKTDTREHPHYYSEAEIKGRIKRLEKQLKKFKMPKYPEFTSETISLQRELYSWKNPDELKISSITDKNESMNYYGKEYLKRYIDLINSQTPQILLEKENNSFYLCFPITKNIEMPKIDDTFEPVGIDWGITRNIAVVSILDSKTKKPKFVKFYSAGYILGKRKHYKSLRKHFGQKKRQDKINKLGTKEDRFIDSNIHKLAFLIVKEIRNHSNKPIILMENITDNREEAEKSMRQNILLHSVKSRLQNYIAYKALWNNIPTNLVKPEHTSQICNRCGHQDRENRPKGSKLFKCVKCNYMSNADFNASINIARKFYIGEYEPFYKDNEKMKSGVNSISM

SEQ ID NO: 30 - protein, 501 aa, synthetic construct
  REGION 1..501: note = Description of Artificial Sequence: Synthetic polypeptide
MEVQKTVMKTLSLRILRPLYSQEIEKEIKEEEKERRKQAGGTGELDGGFYKKLEKKHSEMFSFDRLNLLLNQLQREIAKVYNHAISELYIATIAQGNKSNKHYISSIVYNRAYGYFYNAYIALGICSKVEANFRSNELLTQQSALPTAKSDNFPIVLHKQKGAEGEDGGFRISTEGSDLIFEIPIPFYEYNGENRKEPYKWVKKGGQKPVLKLILSTFRRQRNKGWAKDEGTDAEIRKVTEGKYQVSQIEINRGKKLGEHQKWFANFSIEQPIYERKPNRSIVGGLDVGIRSPLVCAINNSFSRYSVDSNDVFKFSKQVFAFRRRLLSKNSLKRKHGHAAHKLEPITEMTEKNDKFRKKIIERWAKEVTNFFVKNQVGIVQIEDLSTMKDREDHFFNQYLRGFWPYYQMQTLIENKLKEYGIEVKRVQAKYTSQLCSNPNCRYWNNYFNFEYRKVNKFPKFKCEKCNLEISADYNAARNLSTPDIEKFVAKATKGINLPEK

SEQ ID NO: 31 - protein, 582 aa, synthetic construct
  REGION 1..582: note = Description of Artificial Sequence: Synthetic polypeptide
MKVLEFKIHPTEEQVSKIDQSLAACKLLWNLSIALKEESKQRYYRKKHKFDEFSPEIWGLSYSGHYDEKEFKTLKDKEKKLLIGNPCCKIAYFKKTSNGKEYTPLNSIPIRRFMNAENIDKDAVNYLNRKKLAFYFRENTAKFIGEIETEFKKGFFKSVIKPAYDAAKKGIRGIPRFKGRRDKVETLVNGQPETIKIKSNGVIVSSKIGLLKIRGLDRLQGKAPRMAKITRKATGYYLQLTIETDDTIYKESDKCVGLDMGAVAIFTDDLGRQSEAKRYAKIQKKRLNRLQRQASRQKDNSNNQRKTYAKLARVHEKIARQRKGRNAQLAHKITSEYQSVILEDLNLKNMTAAAKPKEREDGDGYKQNGKKRKSGLNKALLDNAIGQLRTFIENKANERGRKIIRVNPKHTSQTCPNCGNIDKANRVSQSKFKCVSCGYEAHADQNAAANILIRGLRDEFLRAIGSLYKFPVSMIGKYPGLAGEFTPDLDANQESIGDAPIENAEHSISKQMKQEGNRTPTQPENGSQSLIFLSAPPQPCGDSHGTNNPKALPNKASKRSSKKPRGAIPENPDQLTIWDLLD

SEQ ID NO: 32 - protein, 1615 aa, Homo sapiens
MPARTAPARVPTLAVPAISLPDDVRRRLKDLERDSLTEKECVKEKLNLLHEFLQTEIKNQLCDLETKLRKEELSEEGYLAKVKSLLNKDLSLENGAHAYNREVNGRLENGNQARSEARRVGMADANSPPKPLSKPRTPRRSKSDGEAKPEPSPSPRITRKSTRQTTITSHFAKGPAKRKPQEESERAKSDESIKEEDKDQDEKRRRVTSRERVARPLPAEEPERAKSGTRTEKEEERDEKEEKRLRSQTKEPTPKQKLKEEPDREARAGVQADEDEDGDEKDEKKHRSQPKDLAAKRRPEEKEPEKVNPQISDEKDEDEKEEKRRKTTPKEPTEKKMARAKTVMNSKTHPPKCIQCGQYLDDPLKYGQHPPDAVDEPQMLTNEKLSIFDANESGFESYEALPQHKLTCFSVYCKHGHLCPIDTGLIEKNIELFFSGSAKPIYDDDPSLEGGVNGKNLGPINEWWITGFDGGEKALIGFSTSFAEYILMDPSPEYAPIFGLMQEKIYISKIVVEFLQSNSDSTYEDLINKIETTVPPSGLNLNRFTEDSLLRHAQFVVEQVESYDEAGDSDEQPIFLTPCMRDLIKLAGVTLGQRRAQARRQTIRHSTREKDRGPTKATTTKLVYQIFDTFFAEQIEKDDREDKENAFKRRRCGVCEVCQQPECGKCKACKDMVKFGGSGRSKQACQERRCPNMAMKEADDDEEVDDNIPEMPSPKKMHQGKKKKQNKNRISWVGEAVKTDGKKSYYKKVCIDAETLEVGDCVSVIPDDSSKPLYLARVTALWEDSSNGQMFHAHWFCAGTDTVLGATSDPLELFLVDECEDMQLSYIHSKVKVIYKAPSENWAMEGGMDPESLLEGDDGKTYFYQLWYDQDYARFESPPKTQPTEDNKFKFCVSCARLAEMRQKEIPRVLEQLEDLDSRVLYYSATKNGILYRVGDGVYLPPEAFTFNIKLSSPVKRPRKEPVDEDLYPEHYRKYSDYIKGSNLDAPEPYRIGRIKEIFCPKKSNGRPNETDIKIRVNKFYRPENTHKSTPASYHADINLLYWSDEEAVVDFKAVQGRCTVEYGEDLPECVQVYSMGGPNRFYFLEAYNAKSKSFEDPPNHARSPGNKGKGKGKGKGKPKSQACEPSEPEIEIKLPKLRTLDVFSGCGGLSEGFHQAGISDTLWAIEMWDPAAQAFRLNNPGSTVFTEDCNILLKLVMAGETTNSRGQRLPQKGDVEMLCGGPPCQGFSGMNRFNSRTYSKFKNSLVVSFLSYCDYYRPRFFLLENVRNFVSFKRSMVLKLTLRCLVRMGYQCTFGVLQAGQYGVAQTRRRAIILAAAPGEKLPLFPEPLHVFAPRACQLSVVVDDKKFVSNITRLSSGPFRTITVRDTMSDLPEVRNGASALEISYNGEPQSWFQRQLRGAQYQPILRDHICKDMSALVAARMRHIPLAPGSDWRDLPNIEVRLSDGTMARKLRYTHHDRKNGRSSSGALRGVCSCVEAGKACDPAARQFNTLIPWCLPHTGNRHNHWAGLYGRLEWDGFFSTTVTNPEPMGKQGRVLHPEQHRVVSVRECARSQGFPDTYRLFGNILDKHRQVGNAVPPPLAKAIGLEIKLCMLAKARESASAKIKEEEAAKD

SEQ ID NO: 33 - protein, 912 aa, Homo sapiens
MPAMPSSGPGDTSSSAAEREEDRKDGEEQEEPRGKEERQEPSTTARKVGRPGRKRKHPPVESGDTPKDPAVISKSPSMAQDSGASELLPNGDLEKRSEPQPEEGSPAGGQKGGAPAEGEGAAETLPEASRAVENGCCTPKEGRGAPAEAGKEQKETNIESMKMEGSRGRLRGGLGWESSLRQRPMPRLTFQAGDPYYISKRKRDEWLARWKREAEKKAKVIAGMNAVEENQGPGESQKVEEASPPAVQQPTDPASPTVATTPEPVGSDAGDKNATKAGDDEPEYEDGRGFGIGELVWGKLRGFSWWPGRIVSWWMTGRSRAAEGTRWVMWFGDGKFSVVCVEKLMPLSSFCSAFHQATYNKQPMYRKAIYEVLQVASSRAGKLFPVCHDSDESDTAKAVEVQNKPMIEWALGGFQPSGPKGLEPPEEEKNPYKEVYTDMWVEPEAAAYAPPPPAKKPRKSTAEKPKVKEIIDERTRERLVYEVRQKCRNIEDICISCGSLNVTLEHPLFVGGMCQNCKNCFLECAYQYDDDGYQSYCTICCGGREVLMCGNNNCCRCFCVECVDLLVGPGAAQAAIKEDPWNCYMCGHKGTYGLLRRREDWPSRLQMFFANNHDQEFDPPKVYPPVPAEKRKPIRVLSLFDGIATGLLVLKDLGIQVDRYIASEVCEDSITVGMVRHQGKIMYVGDVRSVTQKHIQEWGPFDLVIGGSPCNDLSIVNPARKGLYEGTGRLFFEFYRLLHDARPKEGDDRPFFWLFENVVAMGVSDKRDISRFLESNPVMIDAKEVSAAHRARYFWGNLPGMNRPLASTVNDKLELQECLEHGRIAKFSKVRTITTRSNSIKQGKDQHFPVFMNEKEDILWCTEMERVFGFPVHYTDVSNMSRLARQRLLGRSWSVPVIRHLFAPLKEYFACV

SEQ ID NO: 34 - protein, 301 aa, Homo sapiens
NHDQEFDPPKVYPPVPAEKRKPIRVLSLFDGIATGLLVLKDLGIQVDRYIASEVCEDSITVGMVRHQGKIMYVGDVRSVTQKHIQEWGPFDLVIGGSPCNDLSIVNPARKGLYEGTGRLFFEFYRLLHDARPKEGDDRPFFWLFENVVAMGVSDKRDISRFLESNPVMIDAKEVSAAHRARYFWGNLPGMNRPLASTVNDKLELQECLEHGRIAKFSKVRTITTRSNSIKQGKDQHFPVFMNEKEDILWCTEMERVFGFPVHYTDVSNMSRLARQRLLGRSWSVPVIRHLFAPLKEYFACV

SEQ ID NO: 35 - protein, 853 aa, Homo sapiens
MKGDTRHLNGEEDAGGREDSILVNGACSDQSSDSPPILEAIRTPEIRGRRSSSRLSKREVSSLLSYTQDLTGDGDGEDGDGSDTPVMPKLFRETRTRSESPAVRTRNNNSVSSRERHRPSPRSTRGRQGRNHVDESPVEFPATRSLRRRATASAGTPWPSPPSSYLTIDLTDDTEDTHGTPQSSSTPYARLAQDSQQGGMESPQVEADSGDGDSSEYQDGKEFGIGDLVWGKIKGFSWWPAMVVSWKATSKRQAMSGMRWVQWFGDGKFSEVSADKLVALGLFSQHFNLATFNKLVSYRKAMYHALEKARVRAGKTFPSSPGDSLEDQLKPMLEWAHGGFKPTGIEGLKPNNTQPVVNKSKVRRAGSRKLESRKYENKTRRRTADDSATSDYCPAPKRLKTNCYNNGKDRGDEDQSREQMASDVANNKSSLEDGCLSCGRKNPVSFHPLFEGGLCQTCRDRFLELFYMYDDDGYQSYCTVCCEGRELLLCSNTSCCRCFCVECLEVLVGTGTAAEAKLQEPWSCYMCLPQRCHGVLRRRKDWNVRLQAFFTSDTGLEYEAPKLYPAIPAARRRPIRVLSLFDGIATGYLVLKELGIKVGKYVASEVCEESIAVGTVKHEGNIKYVNDVRNITKKNIEEWGPFDLVIGGSPCNDLSNVNPARKGLYEGTGRLFFEFYHLLNYSRPKEGDDRPFFWMFENVVAMKVGDKRDISRFLECNPVMIDAIKVSAAHRARYFWGNLPGMNRPVIASKNDKLELQDCLEYNRIAKLKKVQTITTKSNSIKQGKNQLFPVVMNGKEDVLWCTELERIFGFPVHYTDVSNMGRGARQKLLGRSWSVPVIRHLFAPLKDYFACE

SEQ ID NO: 36 - protein, 740 aa, Mus sp.
MRGGSRHLSNEEDVSGCEDCIIISGTCSDQSSDPKTVPLTQVLEAVCTVENRGCRTSSQPSKRKASSLISYVQDLTGDGDEDRDGEVGGSSGSGTPVMPQLFCETRIPSKTPAPLSWQANTSASTPWLSPASPYPIIDLTDEDVIPQSISTPSVDWSQDSHQEGMDTTQVDAESRDGGNIEYQVSADKLLLSQSCILAAFYKLVPYRESIYRTLEKARVRAGKACPSSPGESLEDQLKPMLEWAHGGFKPTGIEGLKPNKKQPENKSRRRTTNDPAASESSPPKRLKTNSYGGKDRGEDEESREQMASDVTNNKGNLEDHCLSCGRKDPVSFHPLFEGGLCQSCRDRFLELFYMYDEDGYQSYCTVCCEGRELLLCSNTSCCRCFCVECLEVLVGAGTAEDVKLQEPWSCYMCLPQRCHGVLRRRKDWNMRLQDFFTTDPDLEEFEPPKLYPAIPAAKRRPIRVLSLFDGIATGYLVLKELGIKVEKYIASEVCAESIAVGTVKHEGQIKYVDDIRNITKEHIDEWGPFDLVIGGSPCNDLSCVNPVRKGLFEGTGRLFFEFYRLLNYSCPEEEDDRPFFWMFENVVAMEVGDKRDISRFLECNPVMIDAIKVSAAHRARYFWGNLPGMNRPVMASKNDKLELQDCLEFSRTAKLKKVQTITTKSNSIRQGKNQLFPVVMNGKDDVLWCTELERIFGFPEHYTDVSNMGRGARQKLLGRSWSVPVIRHLFAPLKDHFACE

SEQ ID NO: 37 - protein, 387 aa, Homo sapiens
MAAIPALDPEAEPSMDVILVGSSELSSSVSPGTGRDLIAYEVKANQRNIEDICICCGSLQVHTQHPLFEGGICAPCKDKFLDALFLYDDDGYQSYCSICCSGETLLICGNPDCTRCYCFECVDSLVGPGTSGKVHAMSNWVCYLCLPSSRSGLLQRRRKWRSQLKAFYDRESENPLEMFETVPVWRRQPVRVLSLFEDIKKELTSLGFLESGSDPGQLKHVVDVTDTVRKDVEEWGPFDLVYGATPPLGHTCDRPPSWYLFQFHRLLQYARPKPGSPRPFFWMFVDNLVLNKEDLDVASRFLEMEPVTIPDVHGGSLQNAVRVWSNIPAIRSSRHWALVSEEELSLLAQNKQSSKLAAKWPTKLVKNCFLPLREYFKYFSTELTSSL

SEQ ID NO: 38 - protein, 213 aa, Homo sapiens
NPLEMFETVPVWRRQPVRVLSLFEDIKKELTSLGFLESGSDPGQLKHVVDVTDTVRKDVEEWGPFDLVYGATPPLGHTCDRPPSWYLFQFHRLLQYARPKPGSPRPFFWMFVDNLVLNKEDLDVASRFLEMEPVTIPDVHGGSLQNAVRVWSNIPAIRSRHWALVSEEELSLLAQNKQSSKLAAKWPTKLVKNCFLPLREYFKYFSTELTSSL

SEQ ID NO: 39 - protein, 421 aa, Mus sp.
MGSRETPSSCSKTLETLDLETSDSSSPDADSPLEEQWLKSSPALKEDSVDVVLEDCKEPLSPSSPPTGREMIRYEVKVNRRSIEDICLCCGTLQVYTRHPLFEGGLCAPCKDKFLESLFLYDDDGHQSYCTICCSGGTLFICESPDCTRCYCFECVDILVGPGTSERINAMACWVCFLCLPFSRSGLLQRRKRWRHQLKAFHDQEGAGPMEIYKTVSAWKRQPVRVLSLFRNIDKVLKSLGFLESGSGSGGGTLKYVEDVTNVVRRDVEKWGPFDLVYGSTQPLGSSCDRCPGWYMFQFHRILQYALPRQESQRPFFWIFMDNLLLTEDDQETTTRFLQTEAVTLQDVRGRDYQNAMRVWSNIPGLKSKHAPLTPKEEEYLQAQVRSRSKLDAPKVDLLVKNCLLPLREYFKYFSQNSLPL

SEQ ID NO: 40 - protein, 214 aa, Mus sp.
GPMEIYKTVSAWKRQPVRVLSLFRNIDKVLKSLGFLESGSGSGGGTLKYVEDVTNVVRRDVEKWGPFDLVYGSTQPLGSSCDRCPGWYMFQFHRILQYALPRQESQRPFFWIFMDNLLLTEDDQETTTRFLQTEAVTLQDVRGRDYQNAMRVWSNIPGLKSKHAPLTPKEEEYLQAQVRSRSKLDAPKVDLLVKNCLLPLREYFKYFSQNSLPL

SEQ ID NO: 41 - protein, 391 aa, Homo sapiens
MEPLRVLELYSGVGGMHHALRESCIPAQVVAAIDVNTVANEVYKYNFPHTQLLAKTIEGITLEEFDRLSFDMILMSPPCQPFTRIGRQGDMTDSRTNSFLHILDILPRLQKLPKYILLENVKGFEVSSTRDLLIQTIENCGFQYQEFLLSPTSLGIPNSRLRYFLIAKLQSEPLPFQAPGQVLMEFPKIESVHPQKYAMDVENKIQEKNVEPNISFDGSIQCSGKDAILFKLETAEEIHRKNQQDSDLSVKMLKDFLEDDTDVNQYLLPPKSLLRYALLLDIVQPTCRRSVCFTKGYGSYIEGTGSVLQTAEDVQVENIYKSLTNLSQEEQITKLLILKLRYFTPKEIANLLGFPPEFGFPEKITVKQRYRLLGNSLNVHVVAKLIKILYE

SEQ ID NO: 42 - protein, 395 aa, Mycoplasma penetrans
MNSNKDKIKVIKVFEAFAGIGSQFKALKNIARSKNWEIQHSGMVEWFVDAIVSYVAIHSKNFNPKIEQLDKDILSISNDSKMPISEYGIKKINNTIKASYLNYAKKHFNNLFDIKKVNKDNFPKNIDIFTYSFPCQDLSVQGLQKGIDKELNTRSGLLWEIERILEEIKNSFSKEEMPKYLLMENVKNLLSHKNKKNYNTWLKQLEKFGYKSKTYLLNSKNFDNCQNRERVFCLSIRDDYLEKTGFKFKELEKVKNPPKKIKDILVDSSNYKYLNLNKYETTTFRETKSNIISRSLKNYTTFNSENYVYNINGIGPTLTASGANSRIKIETQQGVRYLTPLECFKYMQFDVNDFKKVQSTNLISENKMIYIAGNSIPVKILEAIFNTLEFVNNEE

SEQ ID NO: 43 - protein, 386 aa, Spiroplasma monobiae
MSKVENKTKKLRVFEAFAGIGAQRKALEKVRKDEYEIVGLAEWYVPAIVMYQAIHNNFHTKLEYKSVSREEMIDYLENKTLSWNSKNPVSNGYWKRKKDDELKIIYNAIKLSEKEGNIFDIRDLYKRTLKNIDLLTYSFPCQDLSQQGIQKGMKRGSGTRSGLLWEIERALDSTEKNDLPKYLLMENVGALLHKKNEEELNQWKQKLESLGYQNSIEVLNAADFGSSQARRRVFMISTLNEFVELPKGDKKPKSIKKVLNKIVSEKDILNNLLKYNLTEFKKTKSNINKASLIGYSKFNSEGYVYDPEFTGPTLTASGANSRIKIKDGSNIRKMNSDETFLYIGFDSQDGKRVNEIEFLTENQKIFVCGNSISVEVLEAIIDKIGG

SEQ ID NO: 44 - protein, 358 aa, Haemophilus parainfluenzae
MKDVLDDNLLEEPAAQYSLFEPESNPNLREKFTFIDLFAGIGGFRIAMQNLGGKCIFSSEWDEQAQKTYEANFGDLPYGDITLEETKAFIPEKFDILCAGFPCQAFSIAGKRGGFEDTRGTLFFDVAEIIRRHQPKAFFLENVKGLKNHDKGRTLKTILNVLREDLGYFVPEPAIVNAKNFGVPQNRERIYIVGFHKSTGVNSFSYPEPLDKIVTFADIREEKTVPTKYYLSTQYIDTLRKHKERHESKGNGFGYEIIPDDGIANAIVVGGMGRERNLVIDHRITDFTPTTNIKGEVNREGIRKMTPREWARLQGFPDSYVIPVSDASAYKQFGNSVAVPAIQATGKKILEKLGNLYD

SEQ ID NO: 45 - protein, 521 aa, Cellulosimicrobium cellulans
MSKANAKYSFVDLFAGIGGFHAALAATGGVCEYAVEIDREAAAVYERNWNKPALGDITDDANDEGVTLRGYDGPIDVLTGGFPCQPFSKSGAQHGMAETRGTLFWNIARIIEEREPTVLILENVRNLVGPRHRHEWLTIIETLRFFGYEVSGAPAIFSPHLLPAWMGGTPQVRERVFITATLVPERMRDERIPRTETGEIDAEAIGPKPVATMNDRFPIKKGGTELFHPGDRKSGWNLLTSGIIREGDPEPSNVDLRLTETETLWIDAWDDLESTIRRATGRPLEGFPYWADSWTDFRELSRLVVIRGFQAPEREVVGDRKRYVARTDMPEGFVPASVTRPAIDETLPAWKQSHLRRNYDFFERHFAEVVAWAYRWGVYTDLFPASRRKLEWQAQDAPRLWDTVMHFRPSGIRAKRPTYLPALVAITQTSIVGPLERRLSPRETARLQGLPEWFDFGEQRAAATYKQMGNGVNVGVVRHILREHVRRDRALLKLTPAGQRIINAVLADEPDATVGALGAAE

SEQ ID NO: 46 - protein, 330 aa, Haemophilus aegyptius
MNLISLFSGAGGLDLGFQKAGFRIICANEYDKSIWKTYESNHSAKLIKGDISKISSDEFPKCDGIIGGPPCQSWSEGGSLRGIDDPRGKLFYEYIRILKQKKPIFFLAENVKGMMAQRHNKAVQEFIQEFDNAGYDVHIILLNANDYGVAQDRKRVFYIGFRKELNINYLPPIPHLIKPTFKDVIWDLKDNPIPALDKNKTNGNKCIYPNHEYFIGSYSTIFMSRNRVRQWNEPAFTVQASGRQCQLHPQAPVMLKVSKNLNKFVEGKEHLYRRLTVRECARVQGFPDDFIFHYESLNDGYKMIGNAVPVNLAYEIAKTIKSALEICKGN

SEQ ID NO: 47 - protein, 327 aa, Haemophilus haemolyticus
MIEIKDKQLTGLRFIDLFAGLGGFRLALESCGAECVYSNEWDKYAQEVYEMNFGEKPEGDITQVNEKTIPDHDILCAGFPCQAFSISGKQKGFEDSRGTLFFDIARIVREKKPKVVFMENVKNFASHDNGNTLEVVKNTMNELDYSFHAKVLNALDYGIPQKRERIYMICFRNDLNIQNFQFPKPFELNTFVKDLLLPDSEVEHLVIDRKDLVMTNQEIEQTTPKTVRLGIVGKGGQGERIYSTRGIAITLSAYGGGIFAKTGGYLVNGKTRKLHPRECARVMGYPDSYKVHPSTSQAYKQFGNSVVINVLQYIAYNIGSSLNFKPY

SEQ ID NO: 48 - protein, 418 aa, Moraxella sp.
MKPEILKLIRSKLDLTQKQASEIIEVSDKTWQQWESGKTEMHPAYYSFLQEKLKDKINFEELSAQKTLQKKIFDKYNQNQITKNAEELAEITHIEERKDAYSSDFKFIDLFSGIGGIRQSFEVNGGKCVFSSEIDPFAKFTYYTNFGVVPFGDITKVEATTIPQHDILCAGFPCQPFSHIGKREGFEHPTQGTMFHEIVRIIETKKTPVLFLENVPGLINHDDGNTLKVIIETLEDMGYKVHHTVLDASHFGIPQKRKRFYLVAFLNQNIHFEFPKPPMISKDIGEVLESDVTGYSISEHLQKSYLFKKDDGKPSLIDKNTTGAVKTLVSTYHKIQRLTGTFVKDGETGIRLLTTNECKAIMGFPKDFVIPVSRTQMYRQMGNSVVVPVVTKIAEQISLALKTVNQQSPQENFELELV

SEQ ID NO: 49 - protein, 537 aa, Ascobolus sp.
MSERRYEAGMTVALHEGSFLKIQRVYIRQYHADNRREHMLVGPLFRRTKYLKALSKKVNEVAIVHESIHVPVQDVIGVRELIITNRPFPECRKGDEHTGRLVCRWVYNLDERAKGREYKKQRYIRRITEAEADPEYRVEDRVLRRRWFQEGYIGDEISYKEHGNGDIVDIRSESPLQVLDGWGGDLVDLENGEETSIPGPCRSASSYGRLMKPPLAQAADSNTSRKYTFGDTFCGGGGVSLGARQAGLEVKWAFDMNPNAGANYRRNFPNTDFFLAEAEQFIQLSVGISQHVDILHLSPPCQTFSRAHTIAGKNDENNEASFFAVVNLIKAVRPRLFTVEETDGIMDRQSRQFIDTALMGITELGYSFRICVLNAIEYGVCQNRKRLIIIGAAPGEELPPFPLPTHQDFFSKDPRRDLLPAVTLDDALSTITPESTDHHLNHVWQPAEWKTPYDAHRPFKNAIRAGGGEYDIYPDGRRKFTVRELACIQGFPDEYEFVGTLTDKRRIIGNAVPPPLSAAIMSTLRQWMTEKDFERME

SEQ ID NO: 50 - protein, 1534 aa, Arabidopsis sp.
MVENGAKAAKRKKRPLPEIQEVEDVPRTRRPRRAAACTSFKEKSIRVCEKSATIEVKKQQIVEEEFLALRLTALETDVEDRPTRRLNDFVLFDSDGVPQPLEMLEIHDIFVSGAILPSDVCTDKEKEKGVRCTSFGRVEHWSISGYEDGSPVIWISTELADYDCRKPAASYRKVYDYFYEKARASVAVYKKLSKSSGGDPDIGLEELLAAVVRSMSSGSKYFSSGAAIIDFVISQGDFIYNQLAGLDETAKKHESSYVEIPVLVALREKSSKIDKPLQRERNPSNGVRIKEVSQVAESEALTSDQLVDGTDDDRRYAILLQDEENRKSMQQPRKNSSSGSASNMFYIKINEDEIANDYPLPSYYKTSEEETDELILYDASYEVQSEHLPHRMLHNWALYNSDLRFISLELLPMKQCDDIDVNIFGSGVVTDDNGSWISLNDPDSGSQSHDPDGMCIFLSQIKEWMIEFGSDDIISISIRTDVAWYRLGKPSKLYAPWWKPVLKTARVGISILTFLRVESRVARLSFADVTKRLSGLQANDKAYISSDPLAVERYLVVHGQIILQLFAVYPDDNVKRCPFVVGLASKLEDRHHTKWIIKKKKISLKELNLNPRAGMAPVASKRKAMQATTTRLVNRIWGEFYSNYSPEDPLQATAAENGEDEVEEEGGNGEEEVEEEGENGLTEDTVPEPVEVQKPHTPKKIRGSSGKREIKWDGESLGKTSAGEPLYQQALVGGEMVAVGGAVTLEVDDPDEMPAIYFVEYMFESTDHCKMLHGRFLQRGSMTVLGNAANERELFLTNECMTTQLKDIKGVASFEIRSRPWGHQYRKKNITADKLDWARALERKVKDLPTEYYCKSLYSPERGGFFSLPLSDIGRSSGFCTSCKIREDEEKRSTIKLNVSKTGFFINGIEYSVEDFVYVNPDSIGGLKEGSKTSFKSGRNIGLRAYVVCQLLEIVPKESRKADLGSFDVKVRRFYRPEDVSAEKAYASDIQELYFSQDTVVLPPGALEGKCEVRKKSDMPLSREYPISDHIFFCDLFFDTSKGSLKQLPANMKPKFSTIKDDTLLRKKKGKGVESEIESEIVKPVEPPKEIRLATLDIFAGCGGLSHGLKKAGVSDAKWAIEYEEPAGQAFKQNHPESTVFVDNCNVILRAIMEKGGDQDDCVSTTEANELAAKLTEEQKSTLPLPGQVDFINGGPPCQGFSGMNRFNQSSWSKVQCEMILAFLSFADYFRPRYFLLENVRTFVSFNKGQTFQLTLASLLEMGYQVRFGILEAGAYGVSQSRKRAFIWAAAPEEVLPEWPEPMHVFGVPKLKISLSQGLHYAAVRSTALGAPFRPITVRDTIGDLPSVENGDSRTNKEYKEVAVSWFQKEIRGNTIALTDHICKAMNELNLIRCKLIPTRPGADWHDLPKRKVTLSDGRVEEMIPFCLPNTAERHNGWKGLYGRLDWQGNFPTSVTDPQPMGKVGMCFHPEQHRILTVRECARSQGFPDSYEFAGNINHKHRQIGNAVPPPLAFALGRKLKEALHLKKSPQHQP

SEQ ID NO: 51 - protein, 1356 aa, Ascobolus sp.
MELTPELSGVSTDLGGGGSIFAHWRMKEESPAPTEILDDLNVLEWEKTTRDYSKEDLRIADQLFSIEDEHQSLPFETADAEDGTPTEEEEEKELPMRTLDNFVLYDASDLELAALDLIGTELNIHAVGTVGPIYTEGEEDEQEDEDEDVSPPVRTGTQATSASVTQMTVELYIRNIVQYEFCFNDDGTVETWIQTTNAHYKLLQPAKCYTSLYRPVNDCLNVITAIITLAPESTTMSLKDLLKVMDDKAQAVSYEEVERMSEFIVQHLDQWMETAPKKKSKLIEKSKVYIDLNNLAGIDMVSGVRPPPVRRVTGRSSAPKKRIVRNMNDAVLLHQNETTVTNWIHQLSAGMFGRALNVLGAETADVENLTCDPASAKFVVPQRRLHKRLKWETRGHIPVSEEEYKHIYQGKKYAKFFEAVRAVDESKLTIKLGDLVYVLDQDPKVTQTQFATAGREGRKKGAEKEKIQVRFGRVLSIRQPDSNSKDAQNVFIHVQWLVLGCDTILQEMASRRELFLTDSCDTVFADVIYGVAKLTPLGAKDIPTVEFHESMATMMGENEFFVRFKYNYQDGSFTDLKDVDAEQIGTLQPRVNTHRNPGYCSNCRIKYDNERTGDKWIYENDTEGEPRLFRSSKGWCIYAQEFVYLQPVEKQPGTTFRVGYISEINKSSVIVELLARVDDDDKSGHISYSDPRHLYFTGTDIKVTFDKIIRKCFVFHDSGDQKAKAPLMYGTLQRDLYYYRYEKRKGKAELVPVREIRSIHEQTLNDWESRTQIERHGAVSGKKLKGLDIFAGCGGLTLGLDLSGAVDTKWDIEFAPSAANTLALNFPDAQVFNQCANVLLSRAIQSEDEGSLDIEYDLQGRVLPDLPKKGEVDFIYGGPPCQGFSGVNRYKKGNDIKNSLVATFLSYVDHYKPRFVLLENVKGLITTKLGNSKNAEGKWEGGISNGVVKFIYRTLISMNYQCRIGLVQSGEYGVPQSRPRVIFLAARMGERLPDLPEPMHAFEVLDSQYALPHIKRYHTTQNGVAPLPRITIGEAVSDLPKFQYANPGVWPRHDPYSSAKAQPSDKTIEKFSVSKATSFVGYLLQPYHSRPQSEFQRRLRTKLVPSDEPAEKTSLLTTKLVTAHVTRLFNKETTQRIVCVPMWPGADHRSLPKEMRPWCLVDPNSQAEKHRFWPGLFGRLGMEDFFSTALTDVQPCGKQGKVLHPTQRRVYTVRELARAQGFPDWFAFTDGDADSGLGGVKKWHRNIGNAVPVPLGEQIGRCIGYSVWWKDDMIAQLREDGADEDEEMIDGNDQWVEELNTQMAADMPGLPLLVTHLLNLCVYRRLYGPNAKEFLPARVYDKKLEGGRRRLVWAML

SEQ ID NO: 52 - protein, 1454 aa, Neurospora sp.
MDSPDRSHGGMFIDVPAETMGFQEDYLDMFASVLSQGLAKEGDYAHHQPLPAGKEECLEPIAVATTITPSPDDPQLQLQLELEQQFQTESGLNGVDPAPAPESEDEADLPDGFSDESPDDDFVVQRSKHITVDLPVSTLINPRSTFQRIDENDNLVPPPQSTPERVAVEDLLKAAKAAGKNKEDYIEFELHDFNFYVNYAYHPQEMRPIQLVATKVLHDKYYFDGVLKYGNTKHYVTGMQVLELPVGNYGASLHSVKGQIWVRSKHNAKKEIYYLLKKPAFEYQRYYQPFLWIADLGKHVVDYCTRMVERKREVTLGCFKSDFIQWASKAHGKSKAFQNWRAQHPSDDFRTSVAANIGYIWKEINGVAGAKRAAGDQLFRELMIVKPGQYFRQEVPPGPVVTEGDRTVAATIVTPYIKECFGHMILGKVLRLAGEDAEKEKEVKLAKRLKIENKNATKADTKDDMKNDTATESLPTPLRSLPVQVLEATPIESDIVSIVSSDLPPSENNPPPLTNGSVKPKAKANPKPKPSTQPLHAAHVKYLSQELVNKIKVGDVISTPRDDSSNTDTKWKPTDTDDHRWFGLVQRVHTAKTKSSGRGLNSKSFDVIWFYRPEDTPCCAMKYKWRNELFLSNHCTCQEGHHARVKGNEVLAVHPVDWFGTPESNKGEFFVRQLYESEQRRWITLQKDHLTCYHNQPPKPPTAPYKPGDTVLATLSPSDKFSDPYEVVEYFTQGEKETAFVRLRKLLRRRKVDRQDAPANELVYTEDLVDVRAERIVGKCIMRCFRPDERVPSPYDRGGTGNMFFITHRQDHGRCVPLDTLPPTLRQGFNPLGNLGKPKLRGMDLYCGGGNFGRGLEEGGVVEMRWANDIWDKAIHTYMANTPDPNKTNPFLGSVDDLLRLALEGKFSDNVPRPGEVDFIAAGSPCPGFSLLTQDKKVLNQVKNQSLVASFASFVDFYRPKYGVLENVSGIVQTFVNRKQDVLSQLFCALVGMGYQAQLILGDAWAHGAPQSRERVFLYFAAPGLPLPDPPLPSHSHYRVKNRNIGFLCNGESYVQRSFIPTAFKFVSAGEGTADLPKIGDGKPDACVRFPDHRLASGITPYIRAQYACIPTHPYGMNFIKAWNNGNGVMSKSDRDLFPSEGKTRTSDASVGWKRLNPKTLFPTVTTTSNPSDARMGPGLHWDEDRPYTVQEMRRAQGYLDEEVLVGRTTDQWKLVGNSVSRHMALAIGLKFREAWLGTLYDESAVVATATATATTAAAVGVTVPVMEEPGIGTTESSRPSRSPVHTAVDLDDSKSERSRSTTPATVLSTSSAAGDGSANAAGLEDDDNDDMEMMEVTRKRSSPAVDEEGMRPSKVQKVEVTVASPASRRSSRQASRNPTASPSSKASKATTHEAPAPEELESDAESYSETYDKEGFDGDYHSGHEDQYSEEDEEEEYAEPETMTVNGMTIVKL

SEQ ID NO: 53 - protein, 345 aa, Drosophila sp.
MVFRVLELFSGIGGMHYAFNYAQLDGQIVAALDVNTVANAVYAHNYGSNLVKTRNIQSLSVKEVTKLQANMLLMSPPCQPHTRQGLQRDTEDKRSDALTHLCGLIPECQELEYILMENVKGFESSQARNQFIESLERSGFHWREFILTPTQFNVPNTRYRYYCIARKGADFPFAGGKIWEEMPGAIAQNQGLSQIAEIVEENVSPDFLVPDDVLTKRVLVMDIIHPAQSRSMCFTKGYTHYTEGTGSAYTPLSEDESHRIFELVKEIDTSNQDASKSEKILQQRLDLLHQVRLRYFTPREVARLMSFPENFEFPPETTNRQKYRLLGNSINVKVVGELIKLLTIK

SEQ ID NO: 54 - protein, 330 aa, Schizosaccharomyces pombe
MLSTKRLRVLELYSGIGGMHYALNLANIPADIVCAIDINPQANEIYNLNHGKLAKHMDISTLTAKDFDAFDCKLWTMSPSCQPFTRIGNRKDILDPRSQAFLNILNVLPHVNNLPEYILIENVQGFEESKAAEECRKVLRNCGYNLIEGILSPNQFNIPNSRSRWYGLARLNFKGEWSIDDVFQFSEVAQKEGEVKRIRDYLEIERDWSSYMVLESVLNKWGHQFDIVKPDSSSCCCFTRGYTHLVQGAGSILQMSDHENTHEQFERNRMALQLRYFTAREVARLMGFPESLEWSKSNVTEKCMYRLLGNSINVKVVSYLISLLLEPLNF

SEQ ID NO: 55 - protein, 624 aa, Arabidopsis sp.
MVMSHIFLISQIQEVEHGDSDDVNWNTDDDELAIDNFQFSPSPVHISATSPNSIQNRISDETVASFVEMGFSTQMIARAIEETAGANMEPMMILETLFNYSASTEASSSKSKVINHFIAMGFPEEHVIKAMQEHGDEDVGEITNALLTYAEVDKLRESEDMNININDDDDDNLYSLSSDDEEDELNNSSNEDRILQALIKMGYLREDAAIAIERCGEDASMEEVVDFICAAQMARQFDEIYAEPDKKELMNNNKKRRTYTETPRKPNTDQLISLPKEMIGFGVPNHPGLMMHRPVPIPDIARGPPFFYYENVAMTPKGVWAKISSHLYDIVPEFVDSKHFCAAARKRGYIHNLPIQNRFQIQPPQHNTIQEAFPLTKRWWPSWDGRTKLNCLLTCIASSRLTEKIREALERYDGETPLDVQKWVMYECKKWNLVWVGKNKLAPLDADEMEKLLGFPRDHTRGGGISTTDRYKSLGNSFQVDTVAYHLSVLKPLFPNGINVLSLFTGIGGGEVALHRLQIKMNVVVSVEISDANRNILRSFWEQTNQKGILREFKDVQKLDDNTIERLMDEYGGFDLVIGGSPCNNLAGGNRHHRVGLGGEHSSLFFDYCRILEAVRRKARHMRR

SEQ ID NO: 56 - protein, 626 aa, Arabidopsis sp.
MVIWNNDDDDFLEIDNFQSSPRSSPIHAMQCRVENLAGVAVTTSSLSSPTETTDLVQMGFSDEVFATLFDMGFPVEMISRAIKETGPNVETSVIIDTISKYSSDCEAGSSKSKAIDHFLAMGFDEEKVVKAIQEHGEDNMEAIANALLSCPEAKKLPAAVEEEDGIDWSSSDDDTNYTDMLNSDDEKDPNSNENGSKIRSLVKMGFSELEASLAVERCGENVDIAELTDFLCAAQMAREFSEFYTEHEEQKPRHNIKKRRFESKGEPRSSVDDEPIRLPNPMIGFGVPNEPGLITHRSLPELARGPPFFYYENVALTPKGVWETISRHLFEIPPEFVDSKYFCVAARKRGYIHNLPINNRFQIQPPPKYTIHDAFPLSKRWWPEWDKRTKLNCILTCTGSAQLTNRIRVALEPYNEEPEPPKHVQRYVIDQCKKWNLVWVGKNKAAPLEPDEMESILGFPKNHTRGGGMSRTERFKSLGNSFQVDTVAYHLSVLKPIFPHGINVLSLFTGIGGGEVALHRLQIKMKLVVSVEISKVNRNILKDFWEQTNQTGELIEFSDIQHLTNDTIEGLMEKYGGFDLVIGGSPCNNLAGGNRVSRVGLEGDQSSLFFEYCRILEVVRARMRGS

SEQ ID NO: 57 - protein, 791 aa, Arabidopsis sp.
MAARNKQKKRAEPESDLCFAGKPMSVVESTIRWPHRYQSKKTKLQAPTKKPANKGGKKEDEEIIKQAKCHFDKALVDGVLINLNDDVYVTGLPGKLKFIAKVIELFEADDGVPYCRFRWYYRPEDTLIERFSHLVQPKRVFLSNDENDNPLTCIWSKVNIAKVPLPKITSRIEQRVIPPCDYYYDMKYEVPYLNFTSADDGSDASSSLSSDSALNCFENLHKDEKFLLDLYSGCGAMSTGFCMGASISGVKLITKWSVDINKFACDSLKLNHPETEVRNEAAEDFLALLKEWKRLCEKFSLVSSTEPVESISELEDEEVEENDDIDEASTGAELEPGEFEVEKFLGIMFGDPQGTGEKTLQLMVRWKGYNSSYDTWEPYSGLGNCKEKLKEYVIDGFKSHLLPLPGTVYTVCGGPPCQGISGYNRYRNNEAPLEDQKNQQLLVFLDIIDFLKPNYVLMENVVDLLRFSKGFLARHAVASFVAMNYQTRLGMMAAGSYGLPQLRNRVFLWAAQPSEKLPPYPLPTHEVAKKFNTPKEFKDLQVGRIQMEFLKLDNALTLADAISDLPPVTNYVANDVMDYNDAAPKTEFENFISLKRSETLLPAFGGDPTRRLFDHQPLVLGDDDLERVSYIPKQKGANYRDMPGVLVHNNKAEINPRFRAKLKSGKNVVPAYAISFIKGKSKKPFGRLWGDEIVNTVVTRAEPHNQCVIHPMQNRVLSVRENARLQGFPDCYKLCGTIKEKYIQVGNAVAVPVGVALGYAFGMASQGLTDDEPVIKLPFKYPECMQAKDQI

SEQ ID NO: 58 - protein, 1295 aa, Arabidopsis sp.
MLSPAKCESEEAQAPLDLHSSSRSEPECLSLVLWCPNPEEAAPSSTRELIKLPDNGEMSLRRSTTLNCNSPEENGGEGRVSQRKSSRGKSQPLLMLTNGCQLRRSPRFRALHANFDNVCSVPVTKGGVSQRKFSRGKSQPLLTLTNGCQLRRSPRFRAVDGNFDSVCSVPVTGKFGSRKRKSNSALDKKESSDSEGLTFKDIAVIAKSLEMEIISECQYKNNVAEGRSRLQDPAKRKVDSDTLLYSSINSSKQSLGSNKRMRRSQRFMKGTENEGEENLGKSKGKGMSLASCSFRRSTRLSGTVETGNTETLNRRKDCGPALCGAEQVRGTERLVQISKKDHCCEAMKKCEGDGLVSSKQELLVFPSGCIKKTVNGCRDRTLGKPRSSGLNTDDIHTSSLKISKNDTSNGLTMTTALVEQDAMESLLQGKTSACGAADKGKTREMHVNSTVIYLSDSDEPSSIEYLNGDNLTQVESGSALSSGGNEGIVSLDLNNPTKSTKRKGKRVTRTAVQEQNKRSICFFIGEPLSCEEAQERWRWRYELKERKSKSRGQQSEDDEDKIVANVECHYSQAKVDGHTFSLGDFAYIKGEEEETHVGQIVEFFKTTDGESYFRVQWFYRATDTIMERQATNHDKRRLFYSTVMNDNPVDCLISKVTVLQVSPRVGLKPNSIKSDYYFDMEYCVEYSTFQTLRNPKTSENKLECCADVVPTESTESILKKKSFSGELPVLDLYSGCGGMSTGLSLGAKISGVDVVTKWAVDQNTAACKSLKLNHPNTQVRNDAAGDFLQLLKEWDKLCKRYVFNNDQRTDTLRSVNSTKETSGSSSSSDDDSDSEEYEVEKLVDICFGDHDKTGKNGLKFKVHWKGYRSDEDTWELAEELSNCQDAIREFVTSGFKSKILPLPGRVGVICGGPPCQGISGYNRHRNVDSPLNDERNQQIIVFMDIVEYLKPSYVLMENVVDILRMDKGSLGRYALSRLVNMRYQARLGIMTAGCYGLSQFRSRVFMWGAVPNKNLPPFPLPTHDVIVRYGLPLEFERNVVAYAEGQPRKLEKALVLKDAISDLPHVSNDEDREKLPYESLPKTDFQRYIRSTKRDLTGSAIDNCNKRTMLLHDHRPFHINEDDYARVCQIPKRKGANFRDLPGLIVRNNTVCRDPSMEPVILPSGKPLVPGYVFTFQQGKSKRPFARLWWDETVPTVLTVPTCHSQALLHPEQDRVLTIRESARLQGFPDYFQFCGTIKERYCQIGNAVAVSVSRALGYSLGMAFRGLARDEHLIKLPQNFSHSTYPQLQETIPH

SEQ ID NO: 59 - protein, 839 aa, Arabidopsis sp.
MAPKRKRPATKDDTTKSIPKPKKRAPKRAKTVKEEPVTVVEEGEKHVARFLDEPIPESEAKSTWPDRYKPIEVQPPKASSRKKTKDDEKVEIIRARCHYRRAIVDERQIYELNDDAYVQSGEGKDPFICKIIEMFEGANGKLYFTARWFYRPSDTVMKEFEILIKKKRVFFSEIQDTNELGLLEKKLNILMIPLNENTKETIPATENCDFFCDMNYFLPYDTFEAIQQETMMAISESSTISSDTDIREGAAAISEIGECSQETEGHKKATLLDLYSGCGAMSTGLCMGAQLSGLNLVTKWAVDMNAHACKSLQHNHPETNVRNMTAEDFLFLLKEWEKLCIHFSLRNSPNSEEYANLHGLNNVEDNEDVSEESENEDDGEVFTVDKIVGISFGVPKKLLKRGLYLKVRWLNYDDSHDTWEPIEGLSNCRGKIEEFVKLGYKSGILPLPGGVDVVCGGPPCQGISGHNRFRNLLDPLEDQKNKQLLVYMNIVEYLKPKFVLMENVVDMLKMAKGYLARFAVGRLLQMNYQVRNGMMAAGAYGLAQFRLRFFLWGALPSEIIPQFPLPTHDLVHRGNIVKEFQGNIVAYDEGHTVKLADKLLLKDVISDLPAVANSEKRDEITYDKDPTTPFQKFIRLRKDEASGSQSKSKSKKHVLYDHHPLNLNINDYERVCQVPKRKGANFRDFPGVIVGPGNVVKLEEGKERVKLESGKTLVPDYALTYVDGKSCKPFGRLWWDEIVPTVVTRAEPHNQVIIHPEQNRVLSIRENARLQGFPDDYKLFGPPKQKYIQVGNAVAVPVAKALGYALGTAFQGLAVGKDPLLTLPEGFAFMKPTLPSELA

SEQ ID NO: 60 - protein, 142 aa, Neurospora sp.
MAEQNPFVIDDEDDVIQIHDEEEVEEEVAEVIDITEDDIEPSELDRAFGSRPKEETLPSLLLRDQGFIVRPGMTVELKAPIGRFAISFVRVNSIVKVRQAHVNNVTIRGHGFTRAKEMNGMLPKQLNECCLVASIDTRDPRP

SEQ ID NO: 61 - protein, 529 aa, Escherichia coli
MNNNDLVAKLWKLCDNLRDGGVSYQNYVNELASLLFLKMCKETGQEAEYLPEGYRWDDLKSRIGQEQLQFYRKMLVHLGEDDKKLVQAVFHNVSTTITEPKQITALVSNMDSLDWYNGAHGKSRDDFGDMYEGLLQKNANETKSGAGQYFTPRPLIKTIIHLLKPQPREVVQDPAAGTAGFLIEADRYVKSQTNDLDDLDGDTQDFQIHRAFIGLELVPGTRRLALMNCLLHDIEGNLDHGGAIRLGNTLGSDGENLPKAHIVATNPPFGSAAGTNITRTFVHPTSNKQLCFMQHIIETLHPGGRAAVVVPDNVLFEGGKGTDIRRDLMDKCHLHTILRLPTGIFYAQGVKTNVLFFTKGTVANPNQDKNCTDDVWVYDLRTNMPSFGKRTPFTDEHLQPFERVYGEDPHGLSPRTEGEWSFNAEETEVADSEENKNTDQHLATSRWRKFSREWIRTAKSDSLDISWLKDKDSIDADSLPEPDVLAAEAMGELVQALSELDALMRELGASDEADLQRQLLEEAFGGVKE

SEQ ID NO: 62 - protein, 464 aa, Escherichia coli
MSAGKLPEGWVIAPVSTVTTLIRGVTYKKEQAINYLKDDYLPLIRANNIQNGKFDTTDLVFVPKNLVKESQKISPEDIVIAMSSGSKSVVGKSAHQHLPFECSFGAFCGVLRPEKLIFSGFIAHFTKSSLYRNKISSLSAGANINNIKPASFDLINIPIPPLAEQKIIAEKLDTLLAQVDSTKARFEQIPQILKRFRQAVLGGAVNGKLTEKWRNFEPQHSVFKKLNFESILTELRNGLSSKPNESGVGHPILRISSVRAGHVDQNDIRFLECSESELNRHKLQDGDLLFTRYNGSLEFVGVCGLLKKLQHQNLLYPDKLIRARLTKDALPEYIEIFFSSPSARNAMMNCVKTTSGQKGISGKDIKSQVVLLPPVKEQAEIVRRVEQLFAYADTIEKQVNNALARVNNLTQSILAKAFRGELTAQWRAENPDLISGENSAAALLEKIKAERAASGGKKASRKKS

SEQ ID NO: 63 - protein, 421 aa, Thermus aquaticus
MGLPPLLSLPSNSAPRSLGRVETPPEVVDFMVSLAEAPRGGRVLEPACAHGPFLRAFREAHGTAYRFVGVEIDPKALDLPPWAEGILADFLLWEPGEAFDLILGNPPYGIVGEASKYPIHVFKAVKDLYKKAFSTWKGKYNLYGAFLEKAVRLLKPGGVLVFVVPATWLVLEDFALLREFLAREGKTSVYYLGEVFPQKKVSAVVIRFQKSGKGLSLWDTQESESGFTPILWAEYPHWEGEIIRFETEETRKLEISGMPLGDLFHIRFAARSPEFKKHPAVRKEPGPGLVPVLTGRNLKPGWVDYEKNHSGLWMPKERAKELRDFYATPHLVVAHTKGTRVVAAWDERAYPWREEFHLLPKEGVRLDPSSLVQWLNSEAMQKHVRTLYRDFVPHLTLRMLERLPVRREYGFHTSPESARNF

SEQ ID NO: 64 - protein, 278 aa, Escherichia coli
MKKNRAFLKWAGGKYPLLDDIKRHLPKGECLVEPFVGAGSVFLNTDFSRYILADINSDLISLYNIVKMRTDEYVQAARELFVPETNCAEVYYQFREEFNKSQDPFRRAVLFLYLNRYGYNGLCRYNLRGEFNVPFGRYKKPYFPEAELYHFAEKAQNAFFYCESYADSMARADDASVVYCDPPYAPLSATANFTAYHTNSFTLEQQAHLAEIAEGLVERHIPVLISNHDTMLTREWYQRAKLHVVKVRRSISSNGGTRKKVDELLALYKPGVVSPAKK

SEQ ID NO: 65 - protein, 358 aa, Caulobacter vibrioides
MKFGPETIIHGDCIEQMNALPEKSVDLIFADPPYNLQLGGDLLRPDNSKVDAVDDHWDQFESFAAYDKFTREWLKAARRVLKDDGAIWVIGSYHNIFRVGVAVQDLGFWILNDIVWRKSNPMPNFKGTRFANAHETLIWASKSQNAKRYTFNYDALKMANDEVQMRSDWTIPLCTGEERIKGADGQKAHPTQKPEALLYRVILSTTKPGDVILDPFFGVGTTGAAAKRLGRKFIGIEREAEYLEHAKARIAKVVPIAPEDLDVMGSKRAEPRVPFGTIVEAGLLSPGDTLYCSKGTHVAKVRPDGSITVGDLSGSIHKIGALVQSAPACNGWTYWHFKTDAGLAPIDVLRAQVRAGMN

SEQ ID NO: 66 - protein, 577 aa, Clostridioides difficile
MDDISQDNFLLSKEYENSLDVDTKKASGIYYTPKIIVDYIVKKTLKNHDIIKNPYPRILDISCGCGNFLLEVYDILYDLFEENIYELKKKYDENYWTVDNIHRHILNYCIYGADIDEKAISILKDSLTNKKVVNDLDESDIKINLFCCDSLKKKWRYKFDYIVGNPPYIGHKKLEKKYKKFLLEKYSEVYKDKADLYFCFYKKIIDILKQGGIGSVITPRYFLESLSGKDLREYIKSNVNVQEIVDFLGANIFKNIGVSSCILTFDKKKTKETYIDVFKIKNEDICINKFETLEELLKSSKFEHFNINQRLLSDEWILVNKDDETFYNKIQEKCKYSLEDIAISFQGIITGCDKAFILSKDDVKLNLVDDKFLKCWIKSKNINKYIVDKSEYRLIYSNDIDNENTNKRILDEIIGLYKTKLENRRECKSGIRKWYELQWGREKLFFERKKIMYPYKSNENRFAIDYDNNFSSADVYSFFIKEEYLDKFSYEYLVGILNSSVYDKYFKITAKKMSKNIYDYYPNKVMKIRIFRDNNYEEIENLSKQIISILLNKSIDKGKVEKLQIKMDNLIMDSLGI

SEQ ID NO: 67 - protein, 100 aa, unidentified
  REGION 1..100: note = Description of Unknown: ZIM3 sequence
MNNSQGRVTFEDVTVNFTQGEWQRLNPEQRNLYRDVMLENYSNLVSVGQGETTKPDVILRLEQGKEPWLEEEEVLGSGRAEKNGDIGGQIWKPKDVKESL

SEQ ID NO: 68 - protein, 106 aa, unidentified
  REGION 1..106: note = Description of Unknown: ZNF436 sequence
MAATLLMAGSQAPVTFEDMAMYLTREEWRPLDAAQRDLYRDVMQENYGNVVSLDFEIRSENEVNPKQEISEDVQFGTTSERPAENAEENPESEEGFESGDRSERQW

SEQ ID NO: 69 - protein, 95 aa, unidentified
  REGION 1..95: note = Description of Unknown: ZNF257 sequence
MLENYRNLVFLGIAVSKPDLITCLEQGKEPCNMKRHEMVAKPPVMCSHIAEDLCPERDIKYFFQKVILRRYDKCEHENLQLRKGCKSVDECKVCK

SEQ ID NO: 70 - protein, 95 aa, unidentified
  REGION 1..95: note = Description of Unknown: ZNF675 sequence
MGLLTFRDVAIEFSLEEWQCLDTAQRNLYKNVILENYRNLVFLGIAVSKQDLITCLEQEKEPLTVKRHEMVNEPPVMCSHFAQEFWPEQNIKDSF

SEQ ID NO: 71 - protein, 116 aa, unidentified
  REGION 1..116: note = Description of Unknown: ZNF490 sequence
MLQMQNSEHHGQSIKTQTDSISLEDVAVNFTLEEWALLDPGQRNIYRDVMRATFKNLACIGEKWKDQDIEDEHKNQGRNLRSPMVEALCENKEDCPCGKSTSQIPDLNTNLETPTG

SEQ ID NO: 72 - protein, 100 aa, unidentified
  REGION 1..100: note = Description of Unknown: ZNF320 sequence
MALSQGLLTFRDVAIEFSQEEWKCLDPAQRTLYRDVMLENYRNLVSLDISSKCMMNTLSSTGQGNTEVIHTGTLQRQASYHIGAFCSQEIEKDIHDFVFQ

SEQ ID NO: 73 - protein, 98 aa, unidentified
  REGION 1..98: note = Description of Unknown: ZNF331 sequence
MAQGLVTFADVAIDFSQEEWACLNSAQRDLYWDVMLENYSNLVSLDLESAYENKSLPTKKNIHEIRASKRNSDRRSKSLGRNWICEGTLERPQRSRGR

SEQ ID NO: 74 - protein, 118 aa, unidentified
  REGION 1..118: note = Description of Unknown: ZNF816 sequence
MLREEATKKSKEKEPGMALPQGRLTFRDVAIEFSLEEWKCLNPAQRALYRAVMLENYRNLEFVDSSLKSMMEFSSTRHSITGEVIHTGTLQRHKSHHIGDFCFPEMKKDIHHFEFQWQ

SEQ ID NO: 75 - protein, 104 aa, unidentified
  REGION 1..104: note = Description of Unknown: ZNF680 sequence
MPGPPGSLEMGPLTFRDVAIEFSLEEWQCLDTAQRNLYRKVMFENYRNLVFLGIAVSKPHLITCLEQGKEPWNRKRQEMVAKPPVIYSHFTEDLWPEHSIKDSF

SEQ ID NO: 76 - protein, 113 aa, unidentified
  REGION 1..113: note = Description of Unknown: ZNF41 sequence
MSPPWSPALAAEGRGSSCEASVSFEDVTVDFSKEEWQHLDPAQRRLYWDVTLENYSHLLSVGYQIPKSEAAFKLEQGEGPWMLEGEAPHQSCSGEAIGKMQQQGIPGGIFFHC

SEQ ID NO: 77 - protein, 109 aa, unidentified
  REGION 1..109: note = Description of Unknown: ZNF189 sequence
MASPSPPPESKEEWDYLDPAQRSLYKDVMMENYGNLVSLDVLNRDKDEEPTVKQEIEEIEEEVEPQGVIVTRIKSEIDQDPMGRETFELVGRLDKQRGIFLWEIPRESL

SEQ ID NO: 78 - protein, 99 aa, unidentified
  REGION 1..99: note = Description of Unknown: ZNF528 sequence
MALTQGPLKFMDVAIEFSQEEWKCLDPAQRTLYRDVMLENYRNLVSLGICLPDLSVTSMLEQKRDPWTLQSEEKIANDPDGRECIKGVNTERSSKLGSN

SEQ ID NO: 79 - protein, 100 aa, unidentified
  REGION 1..100: note = Description of Unknown: ZNF543 sequence
MAASAQVSVTFEDVAVTFTQEEWGQLDAAQRTLYQEVMLETCGLLMSLGCPLFKPELIYQLDHRQELWMATKDLSQSSYPGDNTKPKTTEPTFSHLALPE

SEQ ID NO: 80 - protein, 144 aa, unidentified
  REGION 1..144: note = Description of Unknown: ZNF554 sequence
MFSQEERMAAGYLPRWSQELVTFEDVSMDFSQEEWELLEPAQKNLYREVMLENYRNVVSLEALKNQCTDVGIKEGPLSPAQTSQVTSLSSWTGYLLFQPVASSHLEQREALWIEEKGTPQASCSDWMTVLRNQDSTYKKVALQE

SEQ ID NO: 81 - protein, 97 aa, unidentified
  REGION 1..97: note = Description of Unknown: ZNF140 sequence
MSQGSVTFRDVAIDFSQEEWKWLQPAQRDLYRCVMLENYGHLVSLGLSISKPDVVSLLEQGKEPWLGKREVKRDLFSVSESSGEIKDFSPKNVIYDD

SEQ ID NO: 82 - protein, 112 aa, unidentified
  REGION 1..112: note = Description of Unknown: ZNF610 sequence
MEEAQKRKAKESGMALPQGRLTFMDVAIEFSQEEWKSLDPGQRALYRDVMLENYRNLVFLGRSCVLGSNAENKPIKNQLGLTLESHLSELQLFQAGRKIYRSNQVEKFTNHR

SEQ ID NO: 83 - protein, 105 aa, unidentified
  REGION 1..105: note = Description of Unknown: ZNF264 sequence
MAAAVLTDRAQVSVTFDDVAVTFTKEEWGQLDLAQRTLYQEVMLENCGLLVSLGCPVPKAELICHLEHGQEPWTRKEDLSQDTCPGDKGKPKTTEPTTCEPALSE

SEQ ID NO: 84 - protein, 99 aa, unidentified
  REGION 1..99: note = Description of Unknown: ZNF350 sequence
MIQAQESITLEDVAVDFTWEEWQLLGAAQKDLYRDVMLENYSNLVAVGYQASKPDALFKLEQGEQLWTIEDGIHSGACSDIWKVDHVLERLQSESLVNR

SEQ ID NO: 85 - protein, 112 aa, unidentified
  REGION 1..112: note = Description of Unknown: ZNF8 sequence
MEGVAGVMSVGPPAARLQEPVTFRDVAVDFTQEEWGQLDPTQRILYRDVMLETFGHLLSIGPELPKPEVISQLEQGTELWVAERGTTQGCHPAWEPRSESQASRKEEGLPEE

SEQ ID NO: 86 - protein, 97 aa, unidentified
  REGION 1..97: note = Description of Unknown: ZNF582 sequence
MSLGSELFRDVAIVFSQEEWQWLAPAQRDLYRDVMLETYSNLVSLGLAVSKPDVISFLEQGKEPWMVERVVSGGLCPVLESRYDTKELFPKQHVYEV

SEQ ID NO: 87 - protein, 105 aa, unidentified
  REGION 1..105: note = Description of Unknown: ZNF30 sequence
MAHKYVGLQYHGSVTFEDVAIAFSQQEWESLDSSQRGLYRDVMLENYRNLVSMAGHSRSKPHVIALLEQWKEPEVTVRKDGRRWCTDLQLEDDTIGCKEMPTSEN

SEQ ID NO: 88 - protein, 92 aa, unidentified
  REGION 1..92: note = Description of Unknown: ZNF324 sequence
MAFEDVAVYFSQEEWGLLDTAQRALYRRVMLDNFALVASLGLSTSRPRVVIQLERGEEPWVPSGTDTTLSRTTYRRRNPGSWSLTEDRDVSG

SEQ ID NO: 89 - protein, 104 aa, unidentified
  REGION 1..104: note = Description of Unknown: ZNF98 sequence
MLENYRNLVFVGIAASKPDLITCLEQGKEPWNVKRHEMVTEPPVVYSYFAQDLWPKQGKKNYFQKVILRTYKKCGRENLQLRKYCKSMDECKVHKECYNGLNQC

SEQ ID NO: 90 - protein, 127 aa, unidentified
  REGION 1..127: note = Description of Unknown: ZNF669 sequence
MHFRRPDPCREPLASPIQDSVAFEDVAVNFTQEEWALLDSSQKNLYREVMQETCRNLASVGSQWKDQNIEDHFEKPGKDIRNHIVQRLCESKEDGQYGEVVSQIPNLDLNENISTGLKPCECSICGK

SEQ ID NO: 91 - protein, 110 aa, unidentified
  REGION 1..110: note = Description of Unknown: ZNF677 sequence
MALSQGLFTFKDVAIEFSQEEWECLDPAQRALYRDVMLENYRNLLSLDEDNIPPEDDISVGFTSKGLSPKENNKEELYHLVILERKESHGINNFDLKEVWENMPKFDSLW

SEQ ID NO: 92 - protein, 98 aa, unidentified
  REGION 1..98: note = Description of Unknown: ZNF596 sequence
MTFEDIIVDFTQEEWALLDTSQRKLFQDVMLENISHLVSIGKQLCKSVVLSQLEQVEKLSTQRISLLQGREVGIKHQEIPFIHHIYQKGTSTISTMRS

SEQ ID NO: 93 - protein, 103 aa, unidentified
  REGION 1..103: note = Description of Unknown: ZNF214 sequence
MAVTFEDVTIIFTWEEWKFLDSSQKRLYREVMWENYTNVMSVENWNESYKSQEEKFRYLEYENFSYWQGWWNAGAQMYENQNYGETVQGTDSKDLTQQDRSQC

SEQ ID NO: 94 - protein, 99 aa, unidentified
  REGION 1..99: note = Description of Unknown: ZNF37A sequence
MITSQGSVSFRDVTVGFTQEEWQHLDPAQRTLYRDVMLENYSHLVSVGYCIPKPEVILKLEKGEEPWILEEKFPSQSHLELINTSRNYSIMKFNEFNKG

SEQ ID NO: 95 - protein, 114 aa, unidentified
  REGION 1..114: note = Description of Unknown: ZNF34 sequence
MFEDVAVYLSREEWGRLGPAQRGLYRDVMLETYGNLVSLGVGPAGPKPGVISQLERGDEPWVLDVQGTSGKEHLRVNSPALGTRTEYKELTSQETFGEEDPQGSEPVEACDHIS

SEQ ID NO: 96 - protein, 112 aa, unidentified
  REGION 1..112: note = Description of Unknown: ZNF250 sequence
METYGNVVSLGLPGSKPDIISQLERGEDPWVLDRKGAKKSQGLWSDYSDNLKYDHTTACTQQDSLSCPWECETKGESQNTDLSPKPLISEQTVILGKTPLGRIDQENNETKQ

SEQ ID NO: 97 - protein, 102 aa, unidentified
  REGION 1..102: note = Description of Unknown: ZNF547 sequence
MAEMNPAQGHVVFEDVAIYFSQEEWGHLDEAQRLLYRDVMLENLALLSSLGCCHGAEDEEAPLEPGVSVGVSQVMAPKPCLSTQNTQPCETCSSLLKDILRL

SEQ ID NO: 98 - protein, 62 aa, unidentified
  REGION 1..62: note = Description of Unknown: ZNF273 sequence
MLDNYRNLVFLGIAVSKPDLITCLEQGKEPCNMKRHAMVAKPPVVCSHFAQDLWPKQGLKDS

SEQ ID NO: 99 - protein, 105 aa, unidentified
  REGION 1..105: note = Description of Unknown: ZNF354A sequence
MAAGQREARPQVSLTFEDVAVLFTRDEWRKLAPSQRNLYRDVMLENYRNLVSLGLPFTKPKVISLLQQGEDPWEVEKDGSGVSSLGSKSSHKTTKSTQTQDSSFQ

SEQ ID NO: 100 - protein, 97 aa, unidentified
  REGION 1..97: note = Description of Unknown: ZFP82 sequence
MALRSVMFSDVSIDFSPEEWEYLDLEQKDLYRDVMLENYSNLVSLGCFISKPDVISSLEQGKEPWKVVRKGRRQYPDLETKYETKKLSLENDIYEIN

SEQ ID NO: 101 - protein, 98 aa, unidentified
  REGION 1..98: note = Description of Unknown: ZNF224 sequence
MTTFKEAMTFKDVAVVFTEEELGLLDLAQRKLYRDVMLENFRNLLSVGHQAFHRDTFHFLREEKIWMMKTAIQREGNSGDKIQTEMETVSEAGTHQEW

SEQ ID NO: 102 - protein, 103 aa, unidentified
  REGION 1..103: note = Description of Unknown: ZNF33A sequence
MFQVEQKSQESVSFKDVTVGFTQEEWQHLDPSQRALYRDVMLENYSNLVSVGYCVHKPEVIFRLQQGEEPWKQEEEFPSQSFPEVWTADHLKERSQENQSKHL

SEQ ID NO: 103 - protein, 98 aa, unidentified
  REGION 1..98: note = Description of Unknown: ZNF45 sequence
MTKSKEAVTFKDVAVVFSEEELQLLDLAQRKLYRDVMLENFRNVVSVGHQSTPDGLPQLEREEKLWMMKMATQRDNSSGAKNLKEMETLQEVGLRYLP

SEQ ID NO: 104 - protein, 112 aa, unidentified
  REGION 1..112: note = Description of Unknown: ZNF175 sequence
MSQKPQVLGPEKQDGSCEASVSFEDVTVDFSREEWQQLDPAQRCLYRDVMLELYSHLFAVGYHIPNPEVIFRMLKEKEPRVEEAEVSHQRCQEREFGLEIPQKEISKKASFQ

SEQ ID NO: 105 - protein, 95 aa, unidentified
  REGION 1..95: note = Description of Unknown: ZNF595 sequence
MELVTFRDVAIEFSPEEWKCLDPAQQNLYRDVMLENYRNLVSLGFVISNPDLVTCLEQIKEPCNLKIHETAAKPPAICSPFSQDLSPVQGIEDSF

SEQ ID NO: 106 - protein, 112 aa, unidentified
  REGION 1..112: note = Description of Unknown: ZNF184 sequence
MSTLLQGGHNLLSSASFQESVTFKDVIVDFTQEEWKQLDPGQRDLFRDVTLENYTHLVSIGLQVSKPDVISQLEQGTEPWIMEPSIPVGTCADWETRLENSVSAPEPDISEE

SEQ ID NO: 107 - protein, 112 aa, unidentified
  REGION 1..112: note = Description of Unknown: ZNF419 sequence
MDPAQVPVAADLLTDHEEGYVTFEDVAVYFSQEEWRLLDDAQRLLYRNVMLENFTLLASLGLASSKTHEITQLESWEEPFMPAWEVVTSAIPRGCWHGAEAEEAPEQIASVG

SEQ ID NO: 108 - protein, 112 aa, unidentified
  REGION 1..112: note = Description of Unknown: ZFP28-1 sequence
MKKLEAVGTGIEPKAMSQGLVTFGDVAVDFSQEEWEWLNPIQRNLYRKVMLENYRNLASLGLCVSKPDVISSLEQGKEPWTVKRKMTRAWCPDLKAVWKIKELPLKKDFCEG

SEQ ID NO: 109 - protein, 108 aa, unidentified
  REGION 1..108: note = Description of Unknown: ZFP28-2 sequence
MSLLGEHWDYDALFETQPGLVTIKNLAVDFRQQLHPAQKNFCKNGIWENNSDLGSAGHCVAKPDLVSLLEQEKEPWMVKRELTGSLFSGQRSVHETQELFPKQDSYAE

SEQ ID NO: 110 - protein, 113 aa, unidentified
  REGION 1..113: note = Description of Unknown: ZNF18 sequence
MLALAASQPARLEERLIRDRDLGASLLPAAPQEQWRQLDSTQKEQYWDLILETYGKMVSGAGISHPKSDLTNSIEFGEELAGIYLHVNEKIPRPTCIGDRQENDKENLNLENH

SEQ ID NO: 111 - protein, 131 aa, unidentified
  REGION 1..131: note = Description of Unknown: ZNF213 sequence
MEGRPGETTDTCFVSGVHGPVALGDIPFYFSREEWGTLDPAQRDLFWDIKRENSRNTTLGFGLKGQSEKSLLQEMVPVVPGQTGSDVTVSWSPEEAEAWESENRPRAALGPVVGARRGRPPTRRRQFRDLA

SEQ ID NO: 112 - protein, 116 aa, unidentified
  REGION 1..116: note = Description of Unknown: ZNF394 sequence
MVAVVRALQRALDGTSSQGMVTFEDTAVSLTWEEWERLDPARRDFCRESAQKDSGSTVPPSLESRVENKELIPMQQILEEAEPQGQLQEAFQGKRPLFSKCGSTHEDRVEKQSGDP

SEQ ID NO: 113 - protein, 113 aa, unidentified
  REGION 1..113: note = Description of Unknown: ZFP1 sequence
MNKSQGSVSFTDVTVDFTQEEWEQLDPSQRILYMDVMLENYSNLLSVEVWKADDQMERDHRNPDEQARQFLILKNQTPIEERGDLFGKALNLNTDFVSLRQVPYKYDLYEKTL

SEQ ID NO: 114 - protein, 108 aa, unidentified
  REGION 1..108: note = Description of Unknown: ZFP14 sequence
MAHGSVTFRDVAIDFSQEEWEFLDPAQRDLYRDVMWENYSNFISLGPSISKPDVITLLDEERKEPGMVVREGTRRYCPDLESRYRTNTLSPEKDIYEIYSFQWDIMER

SEQ ID NO: 115 - protein, 141 aa, unidentified
  REGION 1..141: note = Description of Unknown: ZNF416 sequence
MAAAVLRDSTSVPVTAEAKLMGFTQGCVTFEDVAIYFSQEEWGLLDEAQRLLYRDVMLENFALITALVCWHGMEDEETPEQSVSVEGVPQVRTPEASPSTQKIQSCDMCVPFLTDILHLTDLPGQELYLTGACAVFHQDQK

SEQ ID NO: 116 - protein, 133 aa, unidentified
  REGION 1..133: note = Description of Unknown: ZNF557 sequence
MLPPTAASQREGHTEGGELVNELLKSWLKGLVTFEDVAVEFTQEEWALLDPAQRTLYRDVMLENCRNLASLGNQVDKPRLISQLEQEDKVMTEERGILSGTCPDVENPFKAKGLTPKLHVFRKEQSRNMKMER

SEQ ID NO: 117 - protein, 107 aa, unidentified
  REGION 1..107: note = Description of Unknown: ZNF566 sequence
MAQESVMFSDVSVDFSQEEWECLNDDQRDLYRDVMLENYSNLVSMGHSISKPNVISYLEQGKEPWLADRELTRGQWPVLESRCETKKLFLKKEIYEIESTQWEIMEK

SEQ ID NO: 118 - protein, 114 aa, unidentified
  REGION 1..114: note = Description of Unknown: ZNF729 sequence
MPGAPGSLEMGPLTFRDVTIEFSLEEWQCLDTVQQNLYRDVMLENYRNLVFLGMAVFKPDLITCLKQGKEPWNMKRHEMVTKPPVMRSHFTQDLWPDQSTKDSFQEVILRTYAR

SEQ ID NO: 119 - protein, 95 aa, unidentified
  REGION 1..95: note = Description of Unknown: ZIM2 sequence
MAGSQFPDFKHLGTFLVFEELVTFEDVLVDFSPEELSSLSAAQRNLYREVMLENYRNLVSLGHQFSKPDIISRLEEEESYAMETDSRHTVICQGE

SEQ ID NO: 120 - protein, 78 aa, unidentified
  REGION 1..78: note = Description of Unknown: ZNF254 sequence
MPGPPRSLEMGLLTFRDVAIEFSLEEWQHLDIAQQNLYRNVMLENYRNLAFLGIAVSKPDLITCLEQGKEPWNMKRHE

SEQ ID NO: 121 - protein, 93 aa, unidentified
  REGION 1..93: note = Description of Unknown: ZNF764 sequence
MAPPLAPLPPRDPNGAGPEWREPGAVSFADVAVYFCREEWGCLRPAQRALYRDVMRETYGHLSALGIGGNKPALISWVEEEAELWGPAAQDPE

SEQ ID NO: 122 - protein, 100 aa, unidentified
  REGION 1..100: note = Description of Unknown: ZNF785 sequence
MGPPLAPRPAHVPGEAGPRRTRESRPGAVSFADVAVYFSPEEWECLRPAQRALYRDVMRETFGHLGALGFSVPKPAFISWVEGEVEAWSPEAQDPDGESS

SEQ ID NO: 123 - protein, 573 aa, unidentified
  REGION 1..573: note = Description of Unknown: ZNF10 (KOX1) sequence
MDAKSLTAWSRTLVTFKDVFVDFTREEWKLLDTAQQIVYRNVMLENYKNLVSLGYQLTKPDVILRLEKGEEPWLVEREIHQETHPDSETAFEIKSSVSSRSIFKDKQSCDIKMEGMARNDLWYLSLEEVWKCRDQLDKYQENPERHLRQVAFTQKKVLTQERVSESGKYGGNCLLPAQLVLREYFHKRDSHTKSLKHDLVLNGHQDSCASNSNECGQTFCQNIHLIQFARTHTGDKSYKCPDNDNSLTHGSSLGISKGIHREKPYECKECGKFFSWRSNLTRHQLIHTGEKPYECKECGKSFSRSSHLIGHQKTHTGEEPYECKECGKSFSWFSHLVTHQRTHTGDKLYTCNQCGKSFVHSSRLIRHQRTHTGEKPYECPECGKSFRQSTHLILHQRTHVRVRPYECNECGKSYSQRSHLVVHHRIHTGLKPFECKDCGKCFSRSSHLYSHQRTHTGEKPYECHDCGKSFSQSSALIVHQRIHTGEKPYECCQCGKAFIRKNDLIKHQRIHVGEETYKCNQCGIIFSQNSPFIVHQIAHTGEQFLTCNQCGTALVNTSNLIGYQTNHIRENAY

SEQ ID NO: 124 - protein, 191 aa, unidentified
  REGION 1..191: note = Description of Unknown: CBX5 (chromoshadow domain) sequence
MGKKTKRTADSSSSEDEEEYVVEKVLDRRVVKGQVEYLLKWKGFSEEHNTWEPEKNLDCPELISEFMKKYKKMKEGENNKPREKSESNKRKSNFSNSADDIKSKKKREQSNDIARGFERGLEPEKIIGATDSCGDLMFLMKWKDTDEADLVLAKEANVKCPQIVIAFYEERLTWHAYPEDAENKEKETAKS

SEQ ID NO: 125 - protein, 228 aa, unidentified
  REGION 1..228: note = Description of Unknown: RYBP (YAF2_RYBP component of PRC1) sequence
MTMGDKKSPTRPKRQAKPAADEGFWDCSVCTFRNSAEAFKCSICDVRKGTSTRKPRINSQLVAQQVAQQYATPPPPKKEKKEKVEKQDKEKPEKDKEISPSVTKKNTNKKTKPKSDILKDPPSEANSIQSANATTKTSETNHTSRPRLKNVDRSTAQQLAVTVGNVTVIITDFKEKTRSSSTSSSTVTSSAGSEQQNQSSSGSESTDKGSSRSSTPKGDMSAVNDESF

SEQ ID NO: 126 - protein, 180 aa, unidentified
  REGION 1..180: note = Description of Unknown: YAF2 (YAF2_RYBP component of PRC1) sequence
MGDKKSPTRPKRQPKPSSDEGYWDCSVCTFRNSAEAFKCMMCDVRKGTSTRKPRPVSQLVAQQVTQQFVPPTQSKKEKKDKVEKEKSEKETTSKKNSHKKTRPRLKNVDRSSAQHLEVTVGDLTVIITDFKEKTKSPPASSAASADQHSQSGSSSDNTERGMSRSSSPRGEASSLNGESH

SEQ ID NO: 127 - protein, 3065 aa, unidentified
  REGION 1..3065: note = Description of Unknown: MGA (component of PRC1.6) sequence
MEEKQQIILANQDGGTVAGAAPTFFVILKQPGNGKTDQGILVTNQDACALASSVSSPVKSKGKICLPADCTVGGITVTLDNNSMWNEFYHRSTEMILTKQGRRMFPYCRYWITGLDSNLKYILVMDISPVDNHRYKWNGRWWEPSGKAEPHVLGRVFIHPESPSTGHYWMHQPVSFYKLKLTNNTLDQEGHIILHSMHRYLPRLHLVPAEKAVEVIQLNGPGVHTFTFPQTEFFAVTAYQNIQITQLKIDYNPFAKGFRDDGLNNKPQRDGKQKNSSDQEGNNISSSSGHRVRLTEGQGSEIQPGDLDPLSRGHETSGKGLEKTSLNIKRDFLGFMDTDSALSEVPQLKQEISECLIASSFEDDSRVASPLDQNGSFNVVIKEEPLDDYDYELGECPEGVTVKQEETDEETDVYSNSDDDPILEKQLKRHNKVDNPEADHLSSKWLPSSPSGVAKAKMFKLDTGKMPVVYLEPCAVTRSTVKISELPDNMLSTSRKDKSSMLAELEYLPTYIENSNETAFCLGKESENGLRKHSPDLRVVQKYPLLKEPQWKYPDISDSISTERILDDSKDSVGDSLSGKEDLGRKRTTMLKIATAAKVVNANQNASPNVPGKRGRPRKLKLCKAGRPPKNTGKSLISTKNTPVSPGSTFPDVKPDLEDVDGVLFVSFESKEALDIHAVDGTTEESSSLQASTTNDSGYRARISQLEKELIEDLKTLRHKQVIHPGLQEVGLKLNSVDPTMSIDLKYLGVQLPLAPATSFPFWNLTGTNPASPDAGFPFVSRTGKTNDFTKIKGWRGKFHSASASRNEGGNSESSLKNRSAFCSDKLDEYLENEGKLMETSMGFSSNAPTSPVVYQLPTKSTSYVRTLDSVLKKQSTISPSTSYSLKPHSVPPVSRKAKSQNRQATFSGRTKSSYKSILPYPVSPKQKYSHVILGDKVTKNSSGIISENQANNFVVPTLDENIFPKQISLRQAQQQQQQQQGSRPPGLSKSQVKLMDLEDCALWEGKPRTYITEERADVSLTTLLTAQASLKTKPIHTIIRKRAPPCNNDFCRLGCVCSSLALEKRQPAHCRRPDCMFGCTCLKRKVVLVKGGSKTKHFQRKAAHRDPVFYDTLGEEAREEEEGIREEEEQLKEKKKRKKLEYTICETEPEQPVRHYPLWVKVEGEVDPEPVYIPTPSVIEPMKPLLLPQPEVLSPTVKGKLLTGIKSPRSYTPKPNPVIREEDKDPVYLYFESMMTCARVRVYERKKEDQRQPSSSSSPSPSFQQQTSCHSSPENHNNAKEPDSEQQPLKQLTCDLEDDSDKLQEKSWKSSCNEGESSSTSYMHQRSPGGPTKLIEIISDCNWEEDRNKILSILSQHINSNMPQSLKVGSFIIELASQRKSRGEKNPPVYSSRVKISMPSCQDQDDMAEKSGSETPDGPLSPGKMEDISPVQTDALDSVRERLHGGKGLPFYAGLSPAGKLVAYKRKPSSSTSGLIQVASNAKVAASRKPRTLLPSTSNSKMASSSGTATNRPGKNLKAFVPAKRPIAARPSPGGVFTQFVMSKVGALQQKIPGVSTPQTLAGTQKFSIRPSPVMVVTPVVSSEPVQVCSPVTAAVTTTTPQVFLENTTAVTPMTAISDVETKETTYSSGATTTGVVEVSETNTSTSVTSTQSTATVNLTKTTGITTPVASVAFPKSLVASPSTITLPVASTASTSLVVVTAAASSSMVTTPTSSLGSVPIILSGINGSPPVSQRPENAAQIPVATPQVSPNTVKRAGPRLLLIPVQQGSPTLRPVSNTQLQGHRMVLQPVRSPSGMNLFRHPNGQIVQLLPLHQLRGSNTQPNLQPVMFRNPGSVMGIRLPAPSKPSETPPSSTSSSAFSVMNPVIQAVGSSSAVNVITQAPSLLSSGASFVSQAGTLTLRISPPEPQSFASKTGSETKITYSSGGQPVGTASLIPLQSGSFALLQLPGQKPVPSSILQHVASLQMKRESQNPDQKDETNSIKREQETKKVLQSEGEAVDPEANVIKQNSGAATSEETLNDSLEDRGDHLDEECLPEEGCATVKPSEHSCITGSHTDQDYKDVNEEYGARNRKSSKEKVAVLEVRTISEKASNKTVQNLSKVQHQKLGDVKVEQQKGFDNPEENSSEFPVTFKEESKFELSGSKVMEQQSNLQPEAKEKECGDSLEKDRERWRKHLKGPLTRKCVGASQECKKEADEQLIKETKTCQENSDVFQQEQGISDLLGKSGITEDARVLKTECDSWSRISNPSAFSIVPRRAAKSSRGNGHFQGHLLLPGEQIQPKQEKKGGRSSADFTVLDLEEDDEDDNEKTDDSIDEIVDVVSDYQSEEVDDVEKNNCVEYIEDDEEHVDIETVEELSEEINVAHLKTTAAHTQSFKQPSCTHISADEKAAERSRKAPPIPLKLKPDYWSDKLQKEAEAFAYYRRTHTANERRRRGEMRDLFEKLKITLGLLHSSKVSKSLILTRAFSEIQGLTDQADKLIGQKNLLTRKRNILIRKVSSLSGKTEEVVLKKLEYIYAKQQALEAQKRKKKMGSDEFDISPRISKQQEGSSASSVDLGQMFINNRRGKPLILSRKKDQATENTSPLNTPHTSANLVMTPQGQLLTLKGPLFSGPVVAVSPDLLESDLKPQVAGSAVALPENDDLFMMPRIVNVTSLATEGGLVDMGGSKYPHEVPDSKPSDHLKDTVRNEDNSLEDKGRISSRGNRDGRVTLGPTQVFLANKDSGYPQIVDVSNMQKAQEFLPKKISGDMRGIQYKWKESESRGERVKSKDSSFHKLKMKDLKDSSIEMELRKVTSAIEEAALDSSELLTNMEDEDDTDETLTSLLNEIAFLNQQLNDDSVGLAELPSSMDTEFPGDARRAFISKVPPGSRATFQVEHLGTGLKELPDVQGESDSISPLLLHLEDDDFSENEKQLAEPASEPDVLKIVIDSEIKDSLLSNKKAIDGGKNTSGLPAEPESVSSPPTLHMKTGLENSNSTDTLWRPMPKLAPLGLKVANPSSDADGQSLKVMPCLAPIAAKVGSVGHKMNLTGNDQEGRESKVMPTLAPVVAKLGNSGASPSSAGK

SEQ ID NO: 128 - protein, 185 aa, unidentified
  REGION 1..185: note = Description of Unknown: CBX1 (chromoshadow) sequence
MGKKQNKKKVEEVLEEEEEEYVVEKVLDRRVVKGKVEYLLKWKGFSDEDNTWEPEENLDCPDLIAEFLQSQKTAHETDKSEGGKRKADSDSEDKGEESKPKKKKEESEKPRGFARGLEPERIIGATDSSGELMFLMKWKNSDEADLVPAKEANVKCPQVVISFYEERLTWHSYPSEDDDKKDDKN

SEQ ID NO: 129 - protein, 660 aa, unidentified
  REGION 1..660: note = Description of Unknown: SCMH1 (SAM_1/SPM) sequence
MLVCYSVLACEILWDLPCSIMGSPLGHFTWDKYLKETCSVPAPVHCFKQSYTPPSNEFKISMKLEAQDPRNTTSTCIATVVGLTGARLRLRLDGSDNKNDFWRLVDSAEIQPIGNCEKNGGMLQPPLGFRLNASSWPMFLLKTLNGAEMAPIRIFHKEPPSPSHNFFKMGMKLEAVDRKNPHFICPATIGEVRGSEVLVTFDGWRGAFDYWCRFDSRDIFPVGWCSLTGDNLQPPGTKVVIPKNPYPASDVNTEKPSIHSSTKTVLEHQPGQRGRKPGKKRGRTPKTLISHPISAPSKTAEPLKFPKKRGPKPGSKRKPRTLLNPPPASPTTSTPEPDTSTVPQDAATIPSSAMQAPTVCIYLNKNGSTGPHLDKKKVQQLPDHFGPARASVVLQQAVQACIDCAYHQKTVFSFLKQGHGGEVISAVFDREQHTLNLPAVNSITYVLRFLEKLCHNLRSDNLFGNQPFTQTHLSLTAIEYSHSHDRYLPGETFVLGNSLARSLEPHSDSMDSASNPTNLVSTSQRHRPLLSSCGLPPSTASAVRRLCSRGVLKGSNERRDMESFWKLNRSPGSDRYLESRDASRLSGRDPSSWTVEDVMQFVREADPQLGPHADLFRKHEIDGKALLLLRSDMMMKYMGLKLGPALKLSYHIDRLKQGKF

SEQ ID NO: 130 - protein, 860 aa, unidentified
  REGION 1..860: note = Description of Unknown: MPP8 (Chromodomain) sequence
MEQVAEGARVTAVPVSAADSTEELAEVEEGVGVVGEDNDAAARGAEAFGDSEEDGEDVFEVEKILDMKTEGGKVLYKVRWKGYTSDDDTWEPEIHLEDCKEVLLEFRKKIAENKAKAVRKDIQRLSLNNDIFEANSDSDQQSETKEDTSPKKKKKKLRQREEKSPDDLKKKKAKAGKLKDKSKPDLESSLESLVFDLRTKKRISEAKEELKESKKPKKDEVKETKELKKVKKGEIRDLKTKTREDPKENRKTKKEKFVESQVESESSVLNDSPFPEDDSEGLHSDSREEKQNTKSARERAGQDMGLEHGFEKPLDSAMSAEEDTDVRGRRKKKTPRKAEDTRENRKLENKNAFLEKKTVPKKQRNQDRSKSAAELEKLMPVSAQTPKGRRLSGEERGLWSTDSAEEDKETKRNESKEKYQKRHDSDKEEKGRKEPKGLKTLKEIRNAFDLFKLTPEEKNDVSENNRKREEIPLDFKTIDDHKTKENKQSLKERRNTRDETDTWAYIAAEGDQEVLDSVCQADENSDGRQQILSLGMDLQLEWMKLEDFQKHLDGKDENFAATDAIPSNVLRDAVKNGDYITVKVALNSNEEYNLDQEDSSGMTLVMLAAAGGQDDLLRLLITKGAKVNGRQKNGTTALIHAAEKNFLTTVAILLEAGAFVNVQQSNGETALMKACKRGNSDIVRLVIECGADCNILSKHQNSALHFAKQSNNVLVYDLLKNHLETLSRVAEETIKDYFEARLALLEPVFPIACHRLCEGPDFSTDFNYKPPQNIPEGSGILLFIFHANFLGKEVIARLCGPCSVQAVVLNDKFQLPVFLDSHFVYSFSPVAGPNKLFIRLTEAPSAKVKLLIGAYRVQLQ

SEQ ID NO: 131 - protein, 103 aa, unidentified
  REGION 1..103: note = Description of Unknown: SUMO3 (Rad60-SLD) sequence
MSEEKPKEGVKTENDHINLKVAGQDGSVVQFKIKRHTPLSKLMKAYCERQGLSMRQIRFRFDGQPINETDTPAQLEMEDEDTIDVFQQQTGGVPESSLAGHSF

SEQ ID NO: 132 - protein, 4834 aa, unidentified
  REGION 1..4834: note = Description of Unknown: HERC2 (Cyt-b5) sequence
MPSESFCLAAQARLDSKWLKTDIQLAFTRDGLCGLWNEMVKDGEIVYTGTESTQNGELPPRKDDSVEPSGTKKEDLNDKEKKDEEETPAPIYRAKSILDSWVWGKQPDVNELKECLSVLVKEQQALAVQSATTTLSALRLKQRLVILERYFIALNRTVFQENVKVKWKSSGISLPPVDKKSSRPAGKGVEGLARVGSRAALSFAFAFLRRAWRSGEDADLCSELLQESLDALRALPEASLFDESTVSSVWLEVVERATRFLRSVVTGDVHGTPATKGPGSIPLQDQHLALAILLELAVQRGTLSQMLSAILLLLQLWDSGAQETDNERSAQGTSAPLLPLLQRFQSIICRKDAPHSEGDMHLLSGPLSPNESFLRYLTLPQDNELAIDLRQTAVVVMAHLDRLATPCMPPLCSSPTSHKGSLQEVIGWGLIGWKYYANVIGPIQCEGLANLGVTQIACAEKRFLILSRNGRVYTQAYNSDTLAPQLVQGLASRNIVKIAAHSDGHHYLALAATGEVYSWGCGDGGRLGHGDTVPLEEPKVISAFSGKQAGKHVVHIACGSTYSAAITAEGELYTWGRGNYGRLGHGSSEDEAIPMLVAGLKGLKVIDVACGSGDAQTLAVTENGQVWSWGDGDYGKLGRGGSDGCKTPKLIEKLQDLDVVKVRCGSQFSIALTKDGQVYSWGKGDNQRLGHGTEEHVRYPKLLEGLQGKKVIDVAAGSTHCLALTEDSEVHSWGSNDQCQHFDTLRVTKPEPAALPGLDTKHIVGIACGPAQSFAWSSCSEWSIGLRVPFVVDICSMTFEQLDLLLRQVSEGMDGSADWPPPQEKECVAVATLNLLRLQLHAAISHQVDPEFLGLGLGSILLNSLKQTVVTLASSAGVLSTVQSAAQAVLQSGWSVLLPTAEERARALSALLPCAVSGNEVNISPGRRFMIDLLVGSLMADGGLESALHAAITAEIQDIEAKKEAQKEKEIDEQEANASTFHRSRTPLDKDLINTGICESSGKQCLPLVQLIQQLLRNIASQTVARLKDVARRISSCLDFEQHSRERSASLDLLLRFQRLLISKLYPGESIGQTSDISSPELMGVGSLLKKYTALLCTHIGDILPVAASIASTSWRHFAEVAYIVEGDFTGVLLPELVVSIVLLLSKNAGLMQEAGAVPLLGGLLEHLDRFNHLAPGKERDDHEELAWPGIMESFFTGQNCRNNEEVTLIRKADLENHNKDGGFWTVIDGKVYDIKDFQTQSLTGNSILAQFAGEDPVVALEAALQFEDTRESMHAFCVGQYLEPDQEIVTIPDLGSLSSPLIDTERNLGLLLGLHASYLAMSTPLSPVEIECAKWLQSSIFSGGLQTSQIHYSYNEEKDEDHCSSPGGTPASKSRLCSHRRALGDHSQAFLQAIADNNIQDHNVKDFLCQIERYCRQCHLTTPIMFPPEHPVEEVGRLLLCCLLKHEDLGHVALSLVHAGALGIEQVKHRTLPKSVVDVCRVVYQAKCSLIKTHQEQGRSYKEVCAPVIERLRFLFNELRPAVCNDLSIMSKFKLLSSLPRWRRIAQKIIRERRKKRVPKKPESTDDEEKIGNEESDLEEACILPHSPINVDKRPIAIKSPKDKWQPLLSTVTGVHKYKWLKQNVQGLYPQSPLLSTIAEFALKEEPVDVEKMRKCLLKQLERAEVRLEGIDTILKLASKNFLLPSVQYAMFCGWQRLIPEGIDIGEPLTDCLKDVDLIPPFNRMLLEVTFGKLYAWAVQNIRNVLMDASAKFKELGIQPVPLQTITNENPSGPSLGTIPQARFLLVMLSMLTLQHGANNLDLLLNSGMLALTQTALRLIGPSCDNVEEDMNASAQGASATVLEETRKETAPVQLPVSGPELAAMMKIGTRVMRGVDWKWGDQDGPPPGLGRVIGELGEDGWIRVQWDTGSTNSYRMGKEGKYDLKLAELPAAAQPSAEDSDTEDDSEAEQTERNIHPTAMMFTSTINLLQTLCLSAGVHAEIMQSEATKTLCGLLRMLVESGTTDKTSSPNRLVYREQHRSWCTLGFVRSIALTPQVCGALSSPQWITLLMKVVEGHAPFTATSLQRQILAVHLLQAVLPSWDKTERARDMKCLVEKLFDFLGSLLTTCSSDVPLLRESTLRRRRVRPQASLTATHSSTLAEEVVALLRTLHSLTQWNGLINKYINSQLRSITHSFVGRPSEGAQLEDYFPDSENPEVGGLMAVLAVIGGIDGRLRLGGQVMHDEFGEGTVTRITPKGKITVQFSDMRTCRVCPLNQLKPLPAVAFNVNNLPFTEPMLSVWAQLVNLAGSKLEKHKIKKSTKQAFAGQVDLDLLRCQQLKLYILKAGRALLSHQDKLRQILSQPAVQETGTVHTDDGAVVSPDLGDMSPEGPQPPMILLQQLLASATQPSPVKAIFDKQELEAAALAVCQCLAVESTHPSSPGFEDCSSSEATTPVAVQHIRPARVKRRKQSPVPALPIVVQLMEMGFSRRNIEFALKSLTGASGNASSLPGVEALVGWLLDHSDIQVTELSDADTVSDEYSDEEVVEDVDDAAYSMSTGAVVTESQTYKKRADFLSNDDYAVYVRENIQVGMMVRCCRAYEEVCEGDVGKVIKLDRDGLHDLNVQCDWQQKGGTYWVRYIHVELIGYPPPSSSSHIKIGDKVRVKASVTTPKYKWGSVTHQSVGVVKAFSANGKDIIVDFPQQSHWTGLLSEMELVPSIHPGVTCDGCQMFPINGSRFKCRNCDDFDFCETCFKTKKHNTRHTFGRINEPGQSAVFCGRSGKQLKRCHSSQPGMLLDSWSRMVKSLNVSSSVNQASRLIDGSEPCWQSSGSQGKHWIRLEIFPDVLVHRLKMIVDPADSSYMPSLVVVSGGNSLNNLIELKTININPSDTTVPLLNDCTEYHRYIEIAIKQCRSSGIDCKIHGLILLGRIRAEEEDLAAVPFLASDNEEEEDEKGNSGSLIRKKAAGLESAATIRTKVFVWGLNDKDQLGGLKGSKIKVPSFSETLSALNVVQVAGGSKSLFAVTVEGKVYACGEATNGRLGLGISSGTVPIPRQITALSSYVVKKVAVHSGGRHATALTVDGKVFSWGEGDDGKLGHFSRMNCDKPRLIEALKTKRIRDIACGSSHSAALTSSGELYTWGLGEYGRLGHGDNTTQLKPKMVKVLLGHRVIQVACGSRDAQTLALTDEGLVFSWGDGDFGKLGRGGSEGCNIPQNIERLNGQGVCQIECGAQFSLALTKSGVVWTWGKGDYFRLGHGSDVHVRKPQVVEGLRGKKIVHVAVGALHCLAVTDSGQVYAWGDNDHGQQGNGTTTVNRKPTLVQGLEGQKITRVACGSSHSVAWTTVDVATPSVHEPVLFQTARDPLGASYLGVPSDADSSAASNKISGASNSKPNRPSLAKILLSLDGNLAKQQALSHILTALQIMYARDAVVGALMPAAMIAPVECPSFSSAAPSDASAMASPMNGEECMLAVDIEDRLSPNPWQEKREIVSSEDAVTPSAVTPSAPSASARPFIPVTDDLGAASIIAETMTKTKEDVESQNKAAGPEPQALDEFTSLLIADDTRVVVDLLKLSVCSRAGDRGRDVLSAVLSGMGTAYPQVADMLLELCVTELEDVATDSQSGRLSSQPVVVESSHPYTDDTSTSGTVKIPGAEGLRVEFDRQCSTERRHDPLTVMDGVNRIVSVRSGREWSDWSSELRIPGDELKWKFISDGSVNGWGWRFTVYPIMPAAGPKELLSDRCVLSCPSMDLVTCLLDFRLNLASNRSIVPRLAASLAACAQLSALAASHRMWALQRLRKLLTTEFGQSININRLLGENDGETRALSFTGSALAALVKGLPEALQRQFEYEDPIVRGGKQLLHSPFFKVLVALACDLELDTLPCCAETHKWAWFRRYCMASRVAVALDKRTPLPRLFLDEVAKKIRELMADSENMDVLHESHDIFKREQDEQLVQWMNRRPDDWTLSAGGSGTIYGWGHNHRGQLGGIEGAKVKVPTPCEALATLRPVQLIGGEQTLFAVTADGKLYATGYGAGGRLGIGGTESVSTPTLLESIQHVFIKKVAVNSGGKHCLALSSEGEVYSWGEAEDGKLGHGNRSPCDRPRVIESLRGIEVVDVAAGGAHSACVTAAGDLYTWGKGRYGRLGHSDSEDQLKPKLVEALQGHRVVDIACGSGDAQTLCLTDDDTVWSWGDGDYGKLGRGGSDGCKVPMKIDSLTGLGVVKVECGSQFSVALTKSGAVYTWGKGDYHRLGHGSDDHVRRPRQVQGLQGKKVIAIATGSLHCVCCTEDGEVYTWGDNDEGQLGDGTTNAIQRPRLVAALQGKKVNRVACGSAHTLAWSTSKPASAGKLPAQVPMEYNHLQEIPIIALRNRLLLLHHLSELFCPCIPMFDLEGSLDETGLGPSVGFDTLRGILISQGKEAAFRKVVQATMVRDRQHGPVVELNRIQVKRSRSKGGLAGPDGTKSVFGQMCAKMSSFGPDSLLLPHRVWKVKFVGESVDDCGGGYSESIAEICEELQNGLTPLLIVTPNGRDESGANRDCYLLSPAARAPVHSSMFRFLGVLLGIAIRTGSPLSLNLAEPVWKQLAGMSLTIADLSEVDKDFIPGLMYIRDNEATSEEFEAMSLPFTVPSASGQDIQLSSKHTHITLDNRAEYVRLAINYRLHEFDEQVAAVREGMARVVPVPLLSLFTGYELETMVCGSPDIPLHLLKSVATYKGIEPSASLIQWFWEVMESFSNTERSLFLRFVWGRTRLPRTIADFRGRDFVIQVLDKYNPPDHFLPESYTCFFLLKLPRYSCKQVLEEKLKYAIHFCKSIDTDDYARIALTGEPAADDSSDDSDNEDVDSFASDSTQDYLTGH

SEQ ID NO: 133 - protein, 593 aa, unidentified
  REGION 1..593: note = Description of Unknown: BIN1 (SH3_9) sequence
MAEMGSKGVTAGKIASNVQKKLTRAQEKVLQKLGKADETKDEQFEQCVQNFNKQLTEGTRLQKDLRTYLASVKAMHEASKKLNECLQEVYEPDWPGRDEANKIAENNDLLWMDYHQKLVDQALLTMDTYLGQFPDIKSRIAKRGRKLVDYDSARHHYESLQTAKKKDEAKIAKPVSLLEKAAPQWCQGKLQAHLVAQTNLLRNQAEEELIKAQKVFEEMNVDLQEELPSLWNSRVGFYVNTFQSIAGLEENFHKEMSKLNQNLNDVLVGLEKQHGSNTFTVKAQPSDNAPAKGNKSPSPPDGSPAATPEIRVNHEPEPAGGATPGATLPKSPSQLRKGPPVPPPPKHTPSKEVKQEQILSLFEDTFVPEISVTTPSQFEAPGPFSEQASLLDLDFDPLPPVTSPVKAPTPSGQSIPWDLWEPTESPAGSLPSGEPSAAEGTFAVSWPSQTAEPGPAQPAEASEVAGGTQPAAGAQEPGETAASEAASSSLPAVVVETFPATVNGTVEGGSGAGRLDLPPGFMFKVQAQHDYTATDTDELQLKAGDVVLVIPFQNPEEQDEGWLMGVKESDWNQHKELEKCRGVFPENFTERVP

SEQ ID NO: 134 - protein, 344 aa, unidentified
  REGION 1..344: note = Description of Unknown: PCGF2 (RING finger protein domain) sequence
MHRTTRIKITELNPHLMCALCGGYFIDATTIVECLHSFCKTCIVRYLETNKYCPMCDVQVHKTRPLLSIRSDKTLQDIVYKLVPGLFKDEMKRRRDFYAAYPLTEVPNGSNEDRGEVLEQEKGALSDDEIVSLSIEFYEGARDRDEKKGPLENGDGDKEKTGVRFLRCPAAMTVMHLAKFLRNKMDVPSKYKVEVLYEDEPLKEYYTLMDIAYIYPWRRNGPLPLKYRVQPACKRLTLATVPTPSEGTNTSGASECESVSDKAPSPATLPATSSSLPSPATPSHGSPSSHGPPATHPTSPTPPSTASGATTAANGGSLNCLQTPSSTSRGRKMTVNGAPVPPLT

SEQ ID NO: 135 - protein, 526 aa, unidentified
  REGION 1..526: note = Description of Unknown: TOX (HMG box) sequence
MDVRFYPPPAQPAAAPDAPCLGPSPCLDPYYCNKFDGENMYMSMTEPSQDYVPASQSYPGPSLESEDFNIPPITPPSLPDHSLVHLNEVESGYHSLCHPMNHNGLLPFHPQNMDLPEITVSNMLGQDGTLLSNSISVMPDIRNPEGTQYSSHPQMAAMRPRGQPADIRQQPGMMPHGQLTTINQSQLSAQLGLNMGGSNVPHNSPSPPGSKSATPSPSSSVHEDEGDDTSKINGGEKRPASDMGKKPKTPKKKKKKDPNEPQKPVSAYALFFRDTQAAIKGQNPNATFGEVSKIVASMWDGLGEEQKQVYKKKTEAAKKEYLKQLAAYRASLVSKSYSEPVDVKTSQPPQLINSKPSVFHGPSQAHSALYLSSHYHQQPGMNPHLTAMHPSLPRNIAPKPNNQMPVTVSIANMAVSPPPPLQISPPLHQHLNMQQHQPLTMQQPLGNQLPMQVQSALHSPTMQQGFTLQPDYQTIINPTSTAAQVVTQAMEYVRSGCRNPPPQPVDWNNDYCSSGGMQRDKALYLT

SEQ ID NO: 136 - protein, 472 aa, unidentified
  REGION 1..472: note = Description of Unknown: FOXA1 (HNF3A C-terminal domain) sequence
MLGTVKMEGHETSDWNSYYADTQEAYSSVPVSNMNSGLGSMNSMNTYMTMNTMTTSGNMTPASFNMSYANPGLGAGLSPGAVAGMPGGSAGAMNSMTAAGVTAMGTALSPSGMGAMGAQQAASMNGLGPYAAAMNPCMSPMAYAPSNLGRSRAGGGGDAKTFKRSYPHAKPPYSYISLITMAIQQAPSKMLTLSEIYQWIMDLFPYYRQNQQRWQNSIRHSLSFNDCFVKVARSPDKPGKGSYWTLHPDSGNMFENGCYLRRQKRFKCEKQPGAGGGGGSGSGGSGAKGGPESRKDPSGASNPSADSPLHRGVHGKTGQLEGAPAPGPAASPQTLDHSGATATGGASELKTPASSTAPPISSGPGALASVPASHPAHGLAPHESQLHLKGDPHYSFNHPFSINNLMSSSEQQHKLDFKAYEQALQYSPYGSTLPASLPLGSASVTTRSPIEPSALEPAYYQGVYSRPVLNTS

SEQ ID NO: 137 - protein, 457 aa, unidentified
  REGION 1..457: note = Description of Unknown: FOXA2 (HNF3B C-terminal domain) sequence
MLGAVKMEGHEPSDWSSYYAEPEGYSSVSNMNAGLGMNGMNTYMSMSAAAMGSGSGNMSAGSMNMSSYVGAGMSPSLAGMSPGAGAMAGMGGSAGAAGVAGMGPHLSPSLSPLGGQAAGAMGGLAPYANMNSMSPMYGQAGLSRARDPKTYRRSYTHAKPPYSYISLITMAIQQSPNKMLTLSEIYQWIMDLFPFYRQNQQRWQNSIRHSLSFNDCFLKVPRSPDKPGKGSFWTLHPDSGNMFENGCYLRRQKRFKCEKQLALKEAAGAAGSGKKAAAGAQASQAQLGEAAGPASETPAGTESPHSSASPCQEHKRGGLGELKGTPAAALSPPEPAPSPGQQQQAAAHLLGPPHHPGLPPEAHLKPEHHYAFNHPFSINNLMSSEQQHHHSHHHHQPHKMDLKAYEQVMHYPGYGSPMPGSLAMGPVTNKTGLDASPLAADTSYYQGVYSRPIMNSS

SEQ ID NO: 138 - protein, 584 aa, unidentified
  REGION 1..584: note = Description of Unknown: IRF2BP1 (IRF-2BP1_2 N-terminal domain) sequence
MASVQASRRQWCYLCDLPKMPWAMVWDFSEAVCRGCVNFEGADRIELLIDAARQLKRSHVLPEGRSPGPPALKHPATKDLAAAAAQGPQLPPPQAQPQPSGTGGGVSGQDRYDRATSSGRLPLPSPALEYTLGSRLANGLGREEAVAEGARRALLGSMPGLMPPGLLAAAVSGLGSRGLTLAPGLSPARPLFGSDFEKEKQQRNADCLAELNEAMRGRAEEWHGRPKAVREQLLALSACAPFNVRFKKDHGLVGRVFAFDATARPPGYEFELKLFTEYPCGSGNVYAGVLAVARQMFHDALREPGKALASSGFKYLEYERRHGSGEWRQLGELLTDGVRSFREPAPAEALPQQYPEPAPAALCGPPPRAPSRNLAPTPRRRKASPEPEGEAAGKMTTEEQQQRHWVAPGGPYSAETPGVPSPIAALKNVAEALGHSPKDPGGGGGPVRAGGASPAASSTAQPPTQHRLVARNGEAEVSPTAGAEAVSGGGSGTGATPGAPLCCTLCRERLEDTHFVQCPSVPGHKFCFPCSREFIKAQGPAGEVYCPSGDKCPLVGSSVPWAFMQGEIATILAGDIKVKKERDP

SEQ ID NO: 139 - protein, 587 aa, unidentified
  REGION 1..587: note = Description of Unknown: IRF2BP2 (IRF-2BP1_2 N-terminal domain) sequence
MAAAVAVAAASRRQSCYLCDLPRMPWAMIWDFTEPVCRGCVNYEGADRVEFVIETARQLKRAHGCFPEGRSPPGAAASAAAKPPPLSAKDILLQQQQQLGHGGPEAAPRAPQALERYPLAAAAERPPRLGSDFGSSRPAASLAQPPTPQPPPVNGILVPNGFSKLEEPPELNRQSPNPRRGHAVPPTLVPLMNGSATPLPTALGLGGRAAASLAAVSGTAAASLGSAQPTDLGAHKRPASVSSSAAVEHEQREAAAKEKQPPPPAHRGPADSLSTAAGAAELSAEGAGKSRGSGEQDWVNRPKTVRDTLLALHQHGHSGPFESKFKKEPALTAGRLLGFEANGANGSKAVARTARKRKPSPEPEGEVGPPKINGEAQPWLSTSTEGLKIPMTPTSSFVSPPPPTASPHSNRTTPPEAAQNGQSPMAALILVADNAGGSHASKDANQVHSTTRRNSNSPPSPSSMNQRRLGPREVGGQGAGNTGGLEPVHPASLPDSSLATSAPLCCTLCHERLEDTHFVQCPSVPSHKFCFPCSRQSIKQQGASGEVYCPSGEKCPLVGSNVPWAFMQGEIATILAGDVKVKKERDS

SEQ ID NO: 140 - protein, 796 aa, unidentified
  REGION 1..796: note = Description of Unknown: IRF2BPL IRF-2BP1_2 N-terminal domain sequence
MSAAQVSSSRRQSCYLCDLPRMPWAMIWDFSEPVCRGCVNYEGADRIEFVIETARQLKRAHGCFQDGRSPGPPPPVGVKTVALSAKEAAAAAAAAAAAAAAAQQQQQQQQQQQQQQQQQQQQQQQQQLNHVDGSSKPAVLAAPSGLERYGLSAAAAAAAAAAAAVEQRSRFEYPPPPVSLGSSSHTARLPNGLGGPNGFPKPTPEEGPPELNRQSPNSSSAAASVASRRGTHGGLVTGLPNPGGGGGPQLTVPPNLLPQTLLNGPASAAVLPPPPPHALGSRGPPTPAPPGAPGGPACLGGTPGVSATSSSASSSTSSSVAEVGVGAGGKRPGSVSSTDQERELKEKQRNAEALAELSESLRNRAEEWASKPKMVRDTLLTLAGCTPYEVRFKKDHSLLGRVFAFDAVSKPGMDYELKLFIEYPTGSGNVYSSASGVAKQMYQDCMKDFGRGLSSGFKYLEYEKKHGSGDWRLLGDLLPEAVRFFKEGVPGADMLPQPYLDASCPMLPTALVSLSRAPSAPPGTGALPPAAPSGRGAAASLRKRKASPEPPDSAEGALKLGEEQQRQQWMANQSEALKLTMSAGGFAAPGHAAGGPPPPPPPLGPHSNRTTPPESAPQNGPSPMAALMSVADTLGTAHSPKDGSSVHSTTASARRNSSSPVSPASVPGQRRLASRNGDLNLQVAPPPPSAHPGMDQVHPQNIPDSPMANSGPLCCTICHERLEDTHFVQCPSVPSHKFCFPCSRESIKAQGATGEVYCPSGEKCPLVGSNVPWAFMQGEIATILAGDVKVKKERDP

SEQ ID NO: 141 - protein, 388 aa, unidentified
  REGION 1..388: note = Description of Unknown: HOXA13 (homeodomain) sequence
MTASVLLHPRWIEPTVMFLYDNGGGLVADELNKNMEGAAAAAAAAAAAAAAGAGGGGFPHPAAAAAGGNFSVAAAAAAAAAAAANQCRNLMAHPAPLAPGAASAYSSAPGEAPPSAAAAAAAAAAAAAAAAAASSSGGPGPAGPAGAEAAKQCSPCSAAAQSSSGPAALPYGYFGSGYYPCARMGPHPNAIKSCAQPASAAAAAAFADKYMDTAGPAAEEFSSRAKEFAFYHQGYAAGPYHHHQPMPGYLDMPVVPGLGGPGESRHEPLGLPMESYQPWALPNGWNGQMYCPKEQAQPPHLWKSTLPDVVSHPSDASSYRRGRKKRVPYTKVQLKELEREYATNKFITKDKRRRISATTNLSERQVTIWFQNRRVKEKKVINKLKTTS

SEQ ID NO: 142 - protein, 284 aa, unidentified
  REGION 1..284: note = Description of Unknown: HOXB13 (homeodomain) sequence
MEPGNYATLDGAKDIEGLLGAGGGRNLVAHSPLTSHPAAPTLMPAVNYAPLDLPGSAEPPKQCHPCPGVPQGTSPAPVPYGYFGGGYYSCRVSRSSLKPCAQAATLAAYPAETPTAGEEYPSRPTEFAFYPGYPGTYQPMASYLDVSVVQTLGAPGEPRHDSLLPVDSYQSWALAGGWNSQMCCQGEQNPPGPFWKAAFADSSGQHPPDACAFRRGRKKRIPYSKGQLRELEREYAANKFITKDKRRKISAATSLSERQITIWFQNRRVKEKKVLAKVKNSATP

SEQ ID NO: 143 - protein, 330 aa, unidentified
  REGION 1..330: note = Description of Unknown: HOXC13 (homeodomain) sequence
MTTSLLLHPRWPESLMYVYEDSAAESGIGGGGGGGGGGTGGAGGGCSGASPGKAPSMDGLGSSCPASHCRDLLPHPVLGRPPAPLGAPQGAVYTDIPAPEAARQCAPPPAPPTSSSATLGYGYPFGGSYYGCRLSHNVNLQQKPCAYHPGDKYPEPSGALPGDDLSSRAKEFAFYPSFASSYQAMPGYLDVSVVPGISGHPEPRHDALIPVEGYQHWALSNGWDSQVYCSKEQSQSAHLWKSPFPDVVPLQPEVSSYRRGRKKRVPYTKVQLKELEKEYAASKFITKEKRRRISATTNLSERQVTIWFQNRRVKEKKVVSKSKAPHLHST

SEQ ID NO: 144 - protein, 313 aa, unidentified
  REGION 1..313: note = Description of Unknown: HOXA11 (homeodomain) sequence
MDFDERGPCSSNMYLPSCTYYVSGPDFSSLPSFLPQTPSSRPMTYSYSSNLPQVQPVREVTFREYAIEPATKWHPRGNLAHCYSAEELVHRDCLQAPSAAGVPGDVLAKSSANVYHHPTPAVSSNFYSTVGRNGVLPQAFDQFFETAYGTPENLASSDYPGDKSAEKGPPAATATSAAAAAAATGAPATSSSDSGGGGGCRETAAAAEEKERRRRPESSSSPESSSGHTEDKAGGSSGQRTRKKRCPYTKYQIRELEREFFFSVYINKEKRLQLSRMLNLTDRQVKIWFQNRRMKEKKINRDRLQYYSANPLL

SEQ ID NO: 145 - protein, 304 aa, unidentified
  REGION 1..304: note = Description of Unknown: HOXC11 (homeodomain) sequence
MFNSVNLGNFCSPSRKERGADFGERGSCASNLYLPSCTYYMPEFSTVSSFLPQAPSRQISYPYSAQVPPVREVSYGLEPSGKWHHRNSYSSCYAAADELMHRECLPPSTVTEILMKNEGSYGGHHHPSAPHATPAGFYSSVNKNSVLPQAFDRFFDNAYCGGGDPPAEPPCSGKGEAKGEPEAPPASGLASRAEAGAEAEAEEENTNPSSSGSAHSVAKEPAKGAAPNAPRTRKKRCPYSKFQIRELEREFFFNVYINKEKRLQLSRMLNLTDRQVKIWFQNRRMKEKKLSRDRLQYFSGNPLL

SEQ ID NO: 146 - protein, 342 aa, unidentified
  REGION 1..342: note = Description of Unknown: HOXC10 (homeodomain) sequence
MTCPRNVTPNSYAEPLAAPGGGERYSRSAGMYMQSGSDFNCGVMRGCGLAPSLSKRDEGSSPSLALNTYPSYLSQLDSWGDPKAAYRLEQPVGRPLSSCSYPPSVKEENVCCMYSAEKRAKSGPEAALYSHPLPESCLGEHEVPVPSYYRASPSYSALDKTPHCSGANDFEAPFEQRASLNPRAEHLESPQLGGKVSFPETPKSDSQTPSPNEIKTEQSLAGPKGSPSESEKERAKAADSSPDTSDNEAKEEIKAENTTGNWLTAKSGRKKRCPYTKHQTLELEKEFLFNMYLTRERRLEISKTINLTDRQVKIWFQNRRMKLKKMNRENRIRELTSNFNFT

SEQ ID NO: 147 - protein, 410 aa, unidentified
  REGION 1..410: note = Description of Unknown: HOXA10 (homeodomain) sequence
MSARKGYLLPSPNYPTTMSCSESPAANSFLVDSLISSGRGEAGGGGGGAGGGGGGGYYAHGGVYLPPAADLPYGLQSCGLFPTLGGKRNEAASPGSGGGGGGLGPGAHGYGPSPIDLWLDAPRSCRMEPPDGPPPPPQQQPPPPPQPPQPAPQATSCSFAQNIKEESSYCLYDSADKCPKVSATAAELAPFPRGPPPDGCALGTSSGVPVPGYFRLSQAYGTAKGYGSGGGGAQQLGAGPFPAQPPGRGFDLPPALASGSADAARKERALDSPPPPTLACGSGGGSQGDEEAHASSSAAEELSPAPSESSKASPEKDSLGNSKGENAANWLTAKSGRKKRCPYTKHQTLELEKEFLFNMYLTRERRLEISRSVHLTDRQVKIWFQNRRMKLKKMNRENRIRELTANFNFS

SEQ ID NO: 148 - protein, 250 aa, unidentified
  REGION 1..250: note = Description of Unknown: HOXB9 (homeodomain) sequence
MSISGTLSSYYVDSIISHESEDAPPAKFPSGQYASSRQPGHAEHLEFPSCSFQPKAPVFGASWAPLSPHASGSLPSVYHPYIQPQGVPPAESRYLRTWLEPAPRGEAAPGQGQAAVKAEPLLGAPGELLKQGTPEYSLETSAGREAVLSNQRPGYGDNKICEGSEDKERPDQTNPSANWLHARSSRKKRCPYTKYQTLELEKEFLFNMYLTRDRRHEVARLLNLSERQVKIWFQNRRMKMKKMNKEQGKE

SEQ ID NO: 149 - protein, 272 aa, unidentified
  REGION 1..272: note = Description of Unknown: HOXA9 (homeodomain) sequence
MATTGALGNYYVDSFLLGADAADELSVGRYAPGTLGQPPRQAATLAEHPDFSPCSFQSKATVFGASWNPVHAAGANAVPAAVYHHHHHHPYVHPQAPVAAAAPDGRYMRSWLEPTPGALSFAGLPSSRPYGIKPEPLSARRGDCPTLDTHTLSLTDYACGSPPVDREKQPSEGAFSENNAENESGGDKPPIDPNNPAANWLHARSTRKKRCPYTKHQTLELEKEFLFNMYLTRDRRYEVARLLNLTERQVKIWFQNRRMKMKKINKDRAKDE

SEQ ID NO: 150 - protein, 80 aa, Homo sapiens
NKKLEAVGTGIEPKAMSQGLVTFGDVAVDFSQEEWEWLNPIQRNLYRKVMLENYRNLASLGLCVSKPDVISSLEQGKEPW

SEQ ID NO: 151 - protein, 80 aa, Homo sapiens
KMKKFQIPVSFQDLTVNFTQEEWQQLDPAQRLLYRDVMLENYSNLVSVGYHVSKPDVIFKLEQGEEPWIVEEFSNQNYPD

SEQ ID NO: 152 - protein, 80 aa, Homo sapiens
CSQESALSEEEEDTTRPLETVTFKDVAVDLTQEEWEQMKPAQRNLYRDVMLENYSNLVTVGCQVTKPDVIFKLEQEEEPW

SEQ ID NO: 153 - protein, 80 aa, Homo sapiens
ITSQGSVSFRDVTVGFTQEEWQHLDPAQRTLYRDVMLENYSHLVSVGYCIPKPEVILKLEKGEEPWILEEKFPSQSHLEL

SEQ ID NO: 154 - protein, 80 aa, Homo sapiens
PQVTFNDVAIDFTHEEWGWLSSAQRDLYKDVMVQNYENLVSVAGLSVTKPYVITLLEDGKEPWMMEKKLSKGMIPDWESR

SEQ ID NO: 155 - protein, 80 aa, Homo sapiens
PLRFSTLFQEQQKMNISQASVSFKDVTIEFTQEEWQQMAPVQKNLYRDVMLENYSNLVSVGYCCFKPEVIFKLEQGEEPW

SEQ ID NO: 156 - protein, 80 aa, Homo sapiens
QDPSAEGLSEEVPVVFEELPVVFEDVAVYFTREEWGMLDKRQKELYRDVMRMNYELLASLGPAAAKPDLISKLERRAAPW

SEQ ID NO: 157 - protein, 80 aa, Homo sapiens
SQGSVTFRDVAIDFSQEEWKWLQPAQRDLYRCVMLENYGHLVSLGLSISKPDVVSLLEQGKEPWLGKREVKRDLFSVSES

SEQ ID NO: 158 - protein, 80 aa, Homo sapiens
GSLTFRDVAIEFSLEEWQCLDTAQQNLYRNVMLENYRNLVFLGIAAFKPDLIIFLEEGKESWNMKRHEMVEESPVICSHF

SEQ ID NO: 159 - protein, 80 aa, Homo sapiens
NKSQEQVSFKDVCVDFTQEEWYLLDPAQKILYRDVILENYSNLVSVGYCITKPEVIFKIEQGEEPWILEKGFPSQCHPER

SEQ ID NO: 160 - protein, 80 aa, Homo sapiens
PHLLVTFRDVAIDFSQEEWECLDPAQRDLYRDVMLENYSNLISLDLESSCVTKKLSPEKEIYEMESLQWENMGKRINHHL

SEQ ID NO: 161 - protein, 80 aa, Homo sapiens
EEERKTAELQKNRIQDSVVFEDVAVDFTQEEWALLDLAQRNLYRDVMLENFQNLASLGYPLHTPHLISQWEQEEDLQTVK

SEQ ID NO: 162 - protein, 80 aa, Homo sapiens
GLLTFRDVAIEFSLEEWQCLDTAQKNLYRNVMLENYRNLAFLGIAVSKPDLIICLEKEKEPWNMKRDEMVDEPPGICPHF

SEQ ID NO: 163 - protein, 80 aa, Homo sapiens
RAPTQVTVSPETHMDLTKGCVTFEDIAIYFSQDEWGLLDEAQRLLYLEVMLENFALVASLGCGHGTEDEETPSDQNVSVG

SEQ ID NO: 164 - protein, 80 aa, Homo sapiens
AAVSPTTRCQESVTFEDVAVVFTDEEWSRLVPIQRDLYKEVMLENYNSIVSLGLPVPQPDVIFQLKRGDKPWMVDLHGSE

SEQ ID NO: 165 - protein, 80 aa, Homo sapiens
HSLEKVTFEDVAIDFTQEEWDMMDTSKRKLYRDVMLENISHLVSLGYQISKSYIILQLEQGKELWREGRVFLQDQNPDRE

SEQ ID NO: 166 - protein, 80 aa, Homo sapiens
DSVSFEDVAVNFTLEEWALLDSSQKKLYEDVMQETFKNLVCLGKKWEDQDIEDDHRNQGKNRRCHMVERLCESRRGSKCG

SEQ ID NO: 167 - protein, 80 aa, Homo sapiens
NVEVVKVMPQDLVTFKDVAIDFSQEEWQWMNPAQKRLYRSMMLENYQSLVSLGLCISKPYVISLLEQGREPWEMTSEMTR

SEQ ID NO: 168 - protein, 80 aa, Homo sapiens
TQPDEDLHLQAEETQLVKESVTFKDVAIDFTLEEWRLMDPTQRNLHKDVMLENYRNLVSLGLAVSKPDMISHLENGKGPW

SEQ ID NO: 169 - protein, 80 aa, Homo sapiens
TMLQESFSFDDLSVDFTQKEWQLLDPSQKNLYKDVMLENYSSLVSLGYEVMKPDVIFKLEQGEEPWVGDGEIPSSDSPEV

SEQ ID NO: 170 - protein, 80 aa, Homo sapiens
EVVTFGDVAVHFSREEWQCLDPGQRALYREVMLENHSSVAGLAGFLVFKPELISRLEQGEEPWVLDLQGAEGTEAPRTSK

SEQ ID NO: 171 - protein, 80 aa, Homo sapiens
RNAEEERMIAVFLTTWLQEPMTFKDVAVEFTQEEWMMLDSAQRSLYRDVMLENYRNLTSVEYQLYRLTVISPLDQEEIRN

SEQ ID NO: 172 - protein, 80 aa, Homo sapiens
GPQGARRQAFLAFGDVTVDFTQKEWRLLSPAQRALYREVTLENYSHLVSLGILHSKPELIRRLEQGEVPWGEERRRRPGP

SEQ ID NO: 173 - protein, 80 aa, Homo sapiens
HSLKKLTFEDVAIDFTQEEWAMMDTSKRKLYRDVMLENISHLVSLGYQISKSYIILQLEQGKELWREGRVFLQDQNPNRE

SEQ ID NO: 174 - protein, 80 aa, Homo sapiens
MPEVEFPDQFFTVLTMDHELVTLRDVVINFSQEEWEYLDSAQRNLYWDVMMENYSNLLSLDLESRNETKHLSVGKDIIQN

SEQ ID NO: 175 - protein, 80 aa, Homo sapiens
PGAPGSLEMGPLTFRDVTIEFSLEEWQCLDTVQQNLYRDVMLENYRNLVFLGMAVFKPDLITCLKQGKEPWNMKRHEMVT

SEQ ID NO: 176 - protein, 80 aa, Homo sapiens
RDPAQVPVAADLLTDHEEGYVTFEDVAVYFSQEEWRLLDDAQRLLYRNVMLENFTLLASLGLASSKTHEITQLESWEEPF

SEQ ID NO: 177 - protein, 80 aa, Homo sapiens
HSLKKVTFEDVAIDFTQEEWAMMDTSKRKLYRDVMLENISHLVSLGYQISKSYIILQLEQGKELWREGREFLQDQNPDRE

SEQ ID NO: 178 - protein, 80 aa, Homo sapiens
TKSKEAVTFKDVAVVFSEEELQLLDLAQRKLYRDVMLENFRNVVSVGHQSTPDGLPQLEREEKLWMMKMATQRDNSSGAK

SEQ ID NO: 179 - protein, 80 aa, Homo sapiens
SQVTFSDVAIDFSHEEWACLDSAQRDLYKDVMVQNYENLVSVGLSVTKPYVIMLLEDGKEPWMMEKKLSKAYPFPLSHSV

SEQ ID NO: 180 - protein, 80 aa, Homo sapiens
PGPLRSLEMESLQFRDVAVEFSLEEWHCLDTAQQNLYRDVMLENYRHLVFLGIIVSKPDLITCLEQGIKPLTMKRHEMIA

SEQ ID NO: 181 - protein, 80 aa, Homo sapiens
LQTTWPQESVTFEDVAVYFTQNQWASLDPAQRALYGEVMLENYANVASLVAFPFPKPALISHLERGEAPWGPDPWDTEIL

SEQ ID NO: 182 - protein, 80 aa, Homo sapiens
APLLAPRPGETRPGCRKPGTVSFADVAVYFSPEEWGCLRPAQRALYRDVMQETYGHLGALGFPGPKPALISWMEQESEAW

SEQ ID NO: 183 - protein, 80 aa, Homo sapiens
NKVEQKSQESVSFKDVTVGFTQEEWQHLDPSQRALYRDVMLENYSNLVSVGYCVHKPEVIFRLQQGEEPWKQEEEFPSQS

SEQ ID NO: 184 - protein, 80 aa, Homo sapiens
CFSQEERMAAGYLPRWSQELVTFEDVSMDFSQEEWELLEPAQKNLYREVMLENYRNVVSLEALKNQCTDVGIKEGPLSPA

SEQ ID NO: 185 - protein, 80 aa, Homo sapiens
DSVAFEDVAVNFTQEEWALLDPSQKNLYREVMQETLRNLTSIGKKWNNQYIEDEHQNPRRNLRRLIGERLSESKESHQHG

SEQ ID NO: 186 - protein, 80 aa, Homo sapiens
MGPAQVPMNSEVIVDPIQGQVNFEDVFVYFSQEEWVLLDEAQRLLYRDVMLENFALMASLGHTSFMSHIVASLVMGSEPW

SEQ ID NO: 187 - protein, 80 aa, Homo sapiens
TTFKEAMTFKDVAVVFTEEELGLLDLAQRKLYRDVMLENFRNLLSVGHQAFHRDTFHFLREEKIWMMKTAIQREGNSGDK

SEQ ID NO: 188 - protein, 80 aa, Homo sapiens
DSTLLQGGHNLLSSASFQEAVTFKDVIVDFTQEEWKQLDPGQRDLFRDVTLENYTHLVSIGLQVSKPDVISQLEQGTEPW

SEQ ID NO: 189 - protein, 80 aa, Homo sapiens
EARSMLVPPQASVCFEDVAMAFTQEEWEQLDLAQRTLYREVTLETWEHIVSLGLFLSKSDVISQLEQEEDLCRAEQEAPR

SEQ ID NO: 190 - protein, 80 aa, Homo sapiens
DSVVFEDVAVDFTLEEWALLDSAQRDLYRDVMLETFRNLASVDDGTQFKANGSVSLQDMYGQEKSKEQTIPNFTGNNSCA

SEQ ID NO: 191 - protein, 80 aa, Homo sapiens
EESHGALISSCNSRTMTDGLVTFRDVAIDFSQEEWECLDPAQRDLYVDVMLENYSNLVSLDLESKTYETKKIFSENDIFE

SEQ ID NO: 192 - protein, 80 aa, Homo sapiens
VITPQIPMVTEEFVKPSQGHVTFEDIAVYFSQEEWGLLDEAQRCLYHDVMLENFSLMASVGCLHGIEAEEAPSEQTLSAQ

SEQ ID NO: 193 - protein, 80 aa, Homo sapiens
VQLRPQTRMATALRDPASGSVTFEDVAVYFSWEEWDLLDEAQKHLYFDVMLENFALTSSLGCWCGVEHEETPSEQRISGE

SEQ ID NO: 194 - protein, 80 aa, Homo sapiens
MQAQESLTLEDVAVDFTWEEWQFLSPAQKDLYRDVMLENYSNLVAVGYQASKPDALSKLERGEETCTTEDEIYSRICSEI

SEQ ID NO: 195 - protein, 80 aa, Homo sapiens
GPLQFRDVAIEFSLEEWHCLDTAQRNLYRDVMLENYRNLVFLGIVVSKPDLVTCLEQGKKPLTMERHEMIAKPPVMSSHF

SEQ ID NO: 196 - protein, 80 aa, Homo sapiens
NMFKEAVTFKDVAVAFTEEELGLLGPAQRKLYRDVMVENFRNLLSVGHPPFKQDVSPIERNEQLWIMTTATRRQGNLGEK

SEQ ID NO: 197 - protein, 80 aa, Homo sapiens
GALTFRDVAIEFSLEEWQCLDTEQQNLYRNVMLDNYRNLVFLGIAVSKPDLITCLEQEKEPWNLKTHDMVAKPPVICSHI

SEQ ID NO: 198 - protein, 80 aa, Homo sapiens
SPQKSSALAPEDHGSSYEGSVSFRDVAIDFSREEWRHLDPSQRNLYRDVMLETYSHLLSVGYQVPEAEVVMLEQGKEPWA

SEQ ID NO: 199 - protein, 80 aa, Homo sapiens
ELLTFRDVAIEFSPEEWKCLDPAQQNLYRDVMLENYRNLISLGVAISNPDLVIYLEQRKEPYKVKIHETVAKHPAVCSHF

SEQ ID NO: 200 - protein, 80 aa, Homo sapiens
EPLKFRDVAIEFSLEEWQCLDTIQQNLYRNVMLENYRNLVFLGIVVSKPDLITCLEQEKEPWTRKRHRMVAEPPVICSHF

SEQ ID NO: 201 - protein, 80 aa, Homo sapiens
PSARGKSKSKAPITFGDLAIYFSQEEWEWLSPIQKDLYEDVMLENYRNLVSLGLSFRRPNVITLLEKGKAPWMVEPVRRR

SEQ ID NO: 202 - protein, 80 aa, Homo sapiens
TKAQESLTLEDVAVDFTWEEWQFLSPAQKDLYRDVMLENYSNLVSVGYQAGKPDALTKLEQGEPLWTLEDEIHSPAHPEI

SEQ ID NO: 203 - protein, 80 aa, Homo sapiens
SQEEVEVAGIKLCKAMSLGSVTFTDVAIDFSQDEWEWLNLAQRSLYKKVMLENYRNLVSVGLCISKPDVISLLEQEKDPW

SEQ ID NO: 204 - protein, 80 aa, Homo sapiens
TKSLESVSFKDVTVDFSRDEWQQLDLAQKSLYREVMLENYFNLISVGCQVPKPEVIFSLEQEEPCMLDGEIPSQSRPDGD

SEQ ID NO: 205 - protein, 80 aa, Homo sapiens
SGCPGAERNLLVYSYFEKETLTFRDVAIEFSLEEWECLNPAQQNLYMNVMLENYKNLVFLGVAVSKQDPVTCLEQEKEPW

SEQ ID NO: 206 - protein, 80 aa, Homo sapiens
PLQGSVSFKDVTVDFTQEEWQQLDPAQKALYRDVMLENYCHFVSVGFHMAKPDMIRKLEQGEELWTQRIFPSYSYLEEDG

SEQ ID NO: 207 - protein, 80 aa, Homo sapiens
PGPPRSLEMGLLTFRDVAIEFSLEEWQHLDIAQQNLYRNVMLENYRNLAFLGIAVSKPDLITCLEQGKEPWNMKRHEMVD

SEQ ID NO: 208 - protein, 80 aa, Homo sapiens
SGHPGSWEMNSVAFEDVAVNFTQEEWALLDPSQKNLYRDVMQETFRNLASIGNKGEDQSIEDQYKNSSRNLRHIISHSGN

SEQ ID NO: 209 - protein, 80 aa, Homo sapiens
SYGSITFGDVAIDFSHQEWEYLSLVQKTLYQEVMMENYDNLVSLAGHSVSKPDLITLLEQGKEPWMIVREETRGECTDLD

SEQ ID NO: 210 - protein, 80 aa, Homo sapiens
DLFVCSGLEPHTPSVGSQESVTFQDVAVDFTEKEWPLLDSSQRKLYKDVMLENYSNLTSLGYQVGKPSLISHLEQEEEPR

SEQ ID NO: 211 - protein, 80 aa, Homo sapiens
FQTAWRQEPVTFEDVAVYFTQNEWASLDSVQRALYREVMLENYANVASLAFPFTTPVLVSQLEQGELPWGLDPWEPMGRE

SEQ ID NO: 212 - protein, 80 aa, Homo sapiens
ELLTFRDVAIEFSPEEWKCLDPDQQNLYRDVMLENYRNLVSLGVAISNPDLVTCLEQRKEPYNVKIHKIVARPPAMCSHF

SEQ ID NO: 213 - protein, 80 aa, Homo sapiens
AGEAEAQLDPSLQGLVMFEDVTVYFSREEWGLLNVTQKGLYRDVMLENFALVSSLGLAPSRSPVFTQLEDDEQSWVPSWV

SEQ ID NO: 214 - protein, 80 aa, Homo sapiens
AHALVTFRDVAIDFSQKEWECLDTTQRKLYRDVMLENYNNLVSLGYSGSKPDVITLLEQGKEPCVVARDVTGRQCPGLLS

SEQ ID NO: 215 - protein, 80 aa, Homo sapiens
KRIKHWKMASKLILPESLSLLTFEDVAVYFSEEEWQLLNPLEKTLYNDVMQDIYETVISLGLKLKNDTGNDHPISVSTSE

SEQ ID NO: 216 - protein, 80 aa, Homo sapiens
DSVVFEDVAVDFTLEEWALLDSAQRDLYRDVMLETFQNLASVDDETQFKASGSVSQQDIYGEKIPKESKIATFTRNVSWA

SEQ ID NO: 217 - protein, 80 aa, Homo sapiens
NMSQASVSFQDVTVEFTREEWQHLGPVERTLYRDVMLENYSHLISVGYCITKPKVISKLEKGEEPWSLEDEFLNQRYPGY

SEQ ID NO: 218 - protein, 80 aa, Homo sapiens
ISFQESVTFQDVAVDFTAEEWQLLDCAERTLYWDVMLENYRNLISVGCPITKTKVILKVEQGQEPWMVEGANPHESSPES

SEQ ID NO: 219 - protein, 80 aa, Homo sapiens
NTLQGPVSFKDVAVDFTQEEWQQLDPDEKITYRDVMLENYSHLVSVGYDTTKPNVIIKLEQGEEPWIMGGEFPCQHSPEA

SEQ ID NO: 220 - protein, 80 aa, Homo sapiens
HPEEEERMHDELLQAVSKGPVMFRDVSIDFSQEEWECLDADQMNLYKEVMLENFSNLVSVGLSNSKPAVISLLEQGKEPW

SEQ ID NO: 221 - protein, 80 aa, Homo sapiens
SLGSELFRDVAIVFSQEEWQWLAPAQRDLYRDVMLETYSNLVSLGLAVSKPDVISFLEQGKEPWMVERVVSGGLCPVLES

SEQ ID NO: 222 - protein, 80 aa, Homo sapiens
TKFQEMVTFKDVAVVFTEEELGLLDSVQRKLYRDVMLENFRNLLLVAHQPFKPDLISQLEREEKLLMVETETPRDGCSGR

SEQ ID NO: 223 - protein, 80 aa, Homo sapiens
AKRPGPPGSREMGLLTFRDIAIEFSLAEWQCLDHAQQNLYRDVMLENYRNLVSLGIAVSKPDLITCLEQNKEPQNIKRNE

SEQ ID NO: 224 - protein, 80 aa, Homo sapiens
TCMVHRQTMSCSGAGGITAFVAFRDVAVYFTQEEWRLLSPAQRTLHREVMLETYNHLVSLEIPSSKPKLIAQLERGEAPW

SEQ ID NO: 225 - protein, 80 aa, Homo sapiens
IQAQESITLEDVAVDFTWEEWQLLGAAQKDLYRDVMLENYSNLVAVGYQASKPDALFKLEQGEQLWTIEDGIHSGACSDI

SEQ ID NO: 226 - protein, 80 aa, Homo sapiens
AQKRRKRKAKESGMALPQGHLTFRDVAIEFSQAEWKCLDPAQRALYKDVMLENYRNLVSLGISLPDLNINSMLEQRREPW

SEQ ID NO: 227 - protein, 80 aa, Homo sapiens
DSTSVPVTAEAKLMGFTQGCVTFEDVAIYFSQEEWGLLDEAQRLLYRDVMLENFALITALVCWHGMEDEETPEQSVSVEG

SEQ ID NO: 228 - protein, 80 aa, Homo sapiens
GPLTFRDVKIEFSLEEWQCLDTAQRNLYRDVMLENYRNLVFLGIAVSKPDLITWLEQGKEPWNLKRHEMVDKTPVMCSHF

SEQ ID NO: 229 - protein, 80 aa, Homo sapiens
SGCPGAERSLLVQSYFEKGPLTFRDVAIEFSLEEWQCLDSAQQGLYRKVMLENYRNLVFLAGIALTKPDLITCLEQGKEP

SEQ ID NO: 230 - protein, 80 aa, Homo sapiens
GVLTFRDVAVEFSPEEWECLDSAQQRLYRDVMLENYGNLVSLGLAIFKPDLMTCLEQRKEPWKVKRQEAVAKHPAGSFHF

SEQ ID NO: 231 - protein, 80 aa, Homo sapiens
KENLEDISGWGLPEARSKESVSFKDVAVDFTQEEWGQLDSPQRALYRDVMLENYQNLLALGPPLHKPDVISHLERGEEPW

SEQ ID NO: 232 - protein, 80 aa, Homo sapiens
EESEKPRGFARGLEPERIIGATDSSGELMFLMKWKNSDEADLVPAKEANVKCPQVVISFYEERLTWHSYPSEDDDKKDDK

SEQ ID NO: 233 - protein, 80 aa, Homo sapiens
ASVALEDVAVNFTREEWALLGPCQKNLYKDVMQETIRNLDCVVMKWKDQNIEDQYRYPRKNLRCRMLERFVESKDGTQCG

SEQ ID NO: 234 - protein, 80 aa, Homo sapiens
TLLTFRDVAIEFSLEEWKCLDLAQQNLYRDVMLENYRNLFSVGLTVCKPGLITCLEQRKEPWNVKRQEAADGHPEMGFHH

SEQ ID NO: 235 - protein, 80 aa, Homo sapiens
AAALRAPTQQVFVAFEDVAIYFSQEEWELLDEMQRLLYRDVMLENFAVMASLGCWCGAVDEGTPSAESVSVEELSQGRTP

SEQ ID NO: 236 - protein, 80 aa, Homo sapiens
NTFQASVSFQDVTVEFSQEEWQHMGPVERTLYRDVMLENYSHLVSVGYCFTKPELIFTLEQGEDPWLLEKEKGFLSRNSP

SEQ ID NO: 237 - protein, 80 aa, Homo sapiens
DSVAFEDVSVSFSQEEWALLAPSQKKLYRDVMQETFKNLASIGEKWEDPNVEDQHKNQGRNLRSHTGERLCEGKEGSQCA

SEQ ID NO: 238 - protein, 80 aa, Homo sapiens
AQGLVTFADVAIDFSQEEWACLNSAQRDLYWDVMLENYSNLVSLDLESAYENKSLPTEKNIHEIRASKRNSDRRSKSLGR

SEQ ID NO: 239 - protein, 80 aa, Homo sapiens
AVDLLSAQEPVTFRDVAVFFSQDEWLHLDSAQRALYREVMLENYSSLVSLGIPFSMPKLIHQLQQGEDPCMVEREVPSDT

SEQ ID NO: 240 - protein, 80 aa, Homo sapiens
SPQRFPALIPGEPGRSFEGSVSFEDVAVDFTRQEWHRLDPAQRTMHKDVMLETYSNLASVGLCVAKPEMIFKLERGEELW

SEQ ID NO: 241 - protein, 80 aa, Homo sapiens
RVLTFRDVAVEFSPEEWECLDSAQQRLYRDVMLENYGNLFSLGLAIFKPDLITYLEQRKEPWNARRQKTVAKHPAGSLHF

SEQ ID NO: 242 - protein, 80 aa, Homo sapiens
AETKDAAQMLVTFKDVAVTFTREEWRQLDLAQRTLYREVMLETCGLLVSLGHRVPKPELVHLLEHGQELWIVKRGLSHAT

SEQ ID NO: 243 - protein, 80 aa, Homo sapiens
IEYQIPVSFKDVVVGFTQEEWHRLSPAQRALYRDVMLETYSNLVSVGYEGTKPDVILRLEQEEAPWIGEAACPGCHCWED

SEQ ID NO: 244 - protein, 80 aa, Homo sapiens
TKFQEAVTFKDVAVAFTEEELGLLDSAQRKLYRDVMLENFRNLVSVGHQSFKPDMISQLEREEKLWMKELQTQRGKHSGD

SEQ ID NO: 245 - protein, 80 aa, Homo sapiens
DEGVAGVMSVGPPAARLQEPVTFRDVAVDFTQEEWGQLDPTQRILYRDVMLETFGHLLSIGPELPKPEVISQLEQGTELW

SEQ ID NO: 246 - protein, 80 aa, Homo sapiens
GPLTFMDVAIEFSVEEWQCLDTAQQNLYRNVMLENYRNLVFLGIAVSKPDLITCLEQGKEPWNMERHEMVAKPPGMCCYF

SEQ ID NO: 247 - protein, 80 aa, Homo sapiens
HQVGLIRSYNSKTMTCFQELVTFRDVAIDFSRQEWEYLDPNQRDLYRDVMLENYRNLVSLGGHSISKPVVVDLLERGKEP

SEQ ID NO: 248 - protein, 80 aa, Homo sapiens
NATIVMSVRREQGSSSGEGSLSFEDVAVGFTREEWQFLDQSQKVLYKEVMLENYINLVSIGYRGTKPDSLFKLEQGEPPG

SEQ ID NO: 249 - protein, 80 aa, Homo sapiens
FPPARGKELLSFEDVAMYFTREEWGHLNWGQKDLYRDVMLENYRNMVLLGFQFPKPEMICQLENWDEQWILDLPRTGNRK

SEQ ID NO: 250 - protein, 80 aa, Homo sapiens
ELLTFKDVAIEFSPEEWKCLDTSQQNLYRDVMLENYRNLVSLGVSISNPDLVTSLEQRKEPYNLKIHETAARPPAVCSHF

SEQ ID NO: 251 - protein, 80 aa, Homo sapiens
MKSQGLVSFKDVAVDFTQEEWQQLDPSQRTLYRDVMLENYSHLVSMGYPVSKPDVISKLEQGEEPWIIKGDISNWIYPDE

SEQ ID NO: 252 - protein, 80 aa, Homo sapiens
AEGSVMFSDVSIDFSQEEWDCLDPVQRDLYRDVMLENYGNLVSMGLYTPKPQVISLLEQGKEPWMVGRELTRGLCSDLES

SEQ ID NO: 253 - protein, 80 aa, Homo sapiens
GPLTFTDVAIEFSLEEWQCLDTAQQNLYRNVMLENYRNLVFLGIAVSKPDLITCLEKEKEPCKMKRHEMVDEPPVVCSHF

SEQ ID NO: 254 - protein, 80 aa, Homo sapiens
ALSQGLFTFKDVAIEFSQEEWECLDPAQRALYRDVMLENYRNLLSLDEDNIPPEDDISVGFTSKGLSPKENNKEELYHLV

SEQ ID NO: 255 - protein, 80 aa, Homo sapiens
NMEGLVMFQDLSIDFSQEEWECLDAAQKDLYRDVMMENYSSLVSLGLSIPKPDVISLLEQGKEPWMVSRDVLGGWCRDSE

SEQ ID NO: 256 - protein, 80 aa, Homo sapiens
AVSHLPTMVQESVTFKDVAILFTQEEWGQLSPAQRALYRDVMLENYSNLVSLGLLGPKPDTFSQLEKREVWMPEDTPGGF

SEQ ID NO: 257 - protein, 80 aa, Homo sapiens
GPLTIRDVTVEFSLEEWHCLDTAQQNLYRDVMLENYRNLVFLGIAVSKPDLITCLEQGKEPCNMKRHEMVAKPPVMCSHI

SEQ ID NO: 258 - protein, 80 aa, Homo sapiens
AAAVLTDRAQVSVTFDDVAVTFTKEEWGQLDLAQRTLYQEVMLENCGLLVSLGCPVPKAELICHLEHGQEPWTRKEDLSQ

SEQ ID NO: 259 - protein, 80 aa, Homo sapiens
ALRSVMFSDVSIDFSPEEWEYLDLEQKDLYRDVMLENYSNLVSLGCFISKPDVISSLEQGKEPWKVVRKGRRQYPDLETK

SEQ ID NO: 260 - protein, 80 aa, Homo sapiens
AHGSVTFRDVAIDFSQEEWEFLDPAQRDLYRDVMWENYSNFISLGPSISKPDVITLLDEERKEPGMVVREGTRRYCPDLE

SEQ ID NO: 261 - protein, 80 aa, Homo sapiens
APRAQIQGPLTFGDVAVAFTRIEWRHLDAAQRALYRDVMLENYGNLVSVGLLSSKPKLITQLEQGAEPWTEVREAPSGTH

SEQ ID NO: 262 - protein, 80 aa, Homo sapiens
GPLQFRDVAIEFSLEEWHCLDTAQRNLYRNVMLENYRNLVFLGIVVSKPDLITCLEQGKKPLTMKKHEMVANPSVTCSHF

SEQ ID NO: 263 - protein, 80 aa, Homo sapiens
TLPRGQPEVLEWGLPKDQDSVAFEDVAVNFTHEEWALLGPSQKNLYRDVMRETIRNLNCIGMKWENQNIDDQHQNLRRNP

SEQ ID NO: 264 - protein, 80 aa, Homo sapiens
PSPDSMTFEDIIVDFTQEEWALLDTSQRKLFQDVMLENISHLVSIGKQLCKSVVLSQLEQVEKLSTQRISLLQGREVGIK

SEQ ID NO: 265 - protein, 80 aa, Homo sapiens
EESREIRAGQIVLKAMAQGLVTFRDVAIEFSLEEWKCLEPAQRDLYREVTLENFGHLASLGLSISKPDVVSLLEQGKEPW

SEQ ID NO: 266 - protein, 80 aa, Homo sapiens
AASAQVSVTFEDVAVTFTQEEWGQLDAAQRTLYQEVMLETCGLLMSLGCPLFKPELIYQLDHRQELWMATKDLSQSSYPG

SEQ ID NO: 267 - protein, 80 aa, Homo sapiens
RESLEDEVTPGLPTAESQELLTFKDISIDFTQEEWGQLAPAHQNLYREVMLENYSNLVSVGYQLSKPSVISQLEKGEEPW

SEQ ID NO: 268 - protein, 80 aa, Homo sapiens
EGEYIKLKVIGQDSSEIHFKVKMTTHLKKLKESYCQRQGVPMNSLRFLFEGQRIADNHTPKELGMEEEDVIEVYQEQTGG

SEQ ID NO: 269 - protein, 80 aa, Homo sapiens
NKSLGPVSFKDVAVDFTQEEWQQLDPEQKITYRDVMLENYSNLVSVGYHIIKPDVISKLEQGEEPWIVEGEFLLQSYPDE

SEQ ID NO: 270 - protein, 80 aa, Homo sapiens
SPGLLTTRKEALMAFRDVAVAFTQKEWKLLSSAQRTLYREVMLENYSHLVSLGIAFSKPKLIEQLEQGDEPWREENEHLL

SEQ ID NO: 271 - protein, 80 aa, Homo sapiens
MFQDSVAFEDVAVTFTQEEWALLDPSQKNLCRDVMQETFRNLASIGKKWKPQNIYVEYENLRRNLRIVGERLFESKEGHQ

SEQ ID NO: 272 - protein, 80 aa, Homo sapiens
ENDHINLKVAGQDGSVVQFKIKRHTPLSKLMKAYCERQGLSMRQIRFRFDGQPINETDTPAQLEMEDEDTIDVFQQQTGG

SEQ ID NO: 273 - protein, 80 aa, Homo sapiens
PGPLGSLEMGVLTFRDVALEFSLEEWQCLDTAQQNLYRNVMLENYRNLVFVGIAASKPDLITCLEQGKEPWNVKRHEMVT

SEQ ID NO: 274 - protein, 80 aa, Homo sapiens
LSQKPQVLGPEKQDGSCEASVSFEDVTVDFSREEWQQLDPAQRCLYRDVMLELYSHLFAVGYHIPNPEVIFRMLKEKEPR

SEQ ID NO: 275 - protein, 80 aa, Homo sapiens
ALTQGQVTFRDVAIEFSQEEWTCLDPAQRTLYRDVMLENYRNLASLGISCFDLSIISMLEQGKEPFTLESQVQIAGNPDG

SEQ ID NO: 276 - protein, 80 aa, Homo sapiens
NKFQGPVTLKDVIVEFTKEEWKLLTPAQRTLYKDVMLENYSHLVSVGYHVNKPNAVFKLKQGKEPWILEVEFPHRGFPED

SEQ ID NO: 277 - protein, 80 aa, Homo sapiens
ELLTFRDVAIEFSPEEWKCLDPAQQNLYRDVMLENYRNLVSLAVYSYYNQGILPEQGIQDSFKKATLGRYGSCGLENICL

SEQ ID NO: 278 - protein, 80 aa, Homo sapiens
SPQKSSALAPEDHGSSYEGSVSFRDVAIDFSREEWRHLDLSQRNLYRDVMLETYSHLLSVGYQVPKPEVVMLEQGKEPWA

SEQ ID NO: 279 - protein, 80 aa, Homo sapiens
NNSQGRVTFEDVTVNFTQGEWQRLNPEQRNLYRDVMLENYSNLVSVGQGETTKPDVILRLEQGKEPWLEEEEVLGSGRAE

SEQ ID NO: 280 - protein, 80 aa, Homo sapiens
AMALPMPGPQEAVVFEDVAVYFTRIEWSCLAPDQQALYRDVMLENYGNLASLGFLVAKPALISLLEQGEEPGALILQVAE

SEQ ID NO: 281 - protein, 80 aa, Homo sapiens
DSSQHLVTFEDVAVDFTQEEWTLLDQAQRDLYRDVMLENYKNLIILAGSELFKRSLMSGLEQMEELRTGVTGVLQELDLQ

SEQ ID NO: 282 - protein, 80 aa, Homo sapiens
TTFKEAVTFKDVAVFFTEEELGLLDPAQRKLYQDVMLENFTNLLSVGHQPFHPFHFLREEKFWMMETATQREGNSGGKTI

SEQ ID NO: 283 - protein, 80 aa, Homo sapiens
GPLQFRDVAIEFSLEEWHCLDMAQRNLYRDVMLENYRNLVFLGIVVSKPDLITHLEQGKKPSTMQRHEMVANPSVLCSHF

SEQ ID NO: 284 - protein, 80 aa, Homo sapiens
NKSQGSVSFTDVTVDFTQEEWEQLDPSQRILYMDVMLENYSNLLSVEVWKADDQMERDHRNPDEQARQFLILKNQTPIEE

SEQ ID NO: 285 - protein, 80 aa, Homo sapiens
EEEEMNDGSQMVRSQESLTFQDVAVDFTREEWDQLYPAQKNLYRDVMLENYRNLVALGYQLCKPEVIAQLELEEEWVIER

SEQ ID NO: 286 - protein, 80 aa, Homo sapiens
EEATKKSKEKEPGMALPQGRLTFRDVAIEFSLEEWKCLNPAQRALYRAVMLENYRNLEFVDSSLKSMMEFSSTRHSITGE

SEQ ID NO: 287 - protein, 80 aa, Homo sapiens
EKTPAGRIVADCLTDCYQDSVTFDDVAVDFTQEEWTLLDSTQRSLYSDVMLENYKNLATVGGQIIKPSLISWLEQEESRT

SEQ ID NO: 288 - protein, 80 aa, Homo sapiens
AMSQESLTFKDVFVDFTLEEWQQLDSAQKNLYRDVMLENYSHLVSVGHLVGKPDVIFRLGPGDESWMADGGTPVRTCAGE

SEQ ID NO: 289 - protein, 80 aa, Homo sapiens
DSVAFEDVAVNFTLEEWALLDPSQKNLYRDVMRETFRNLASVGKQWEDQNIEDPFKIPRRNISHIPERLCESKEGGQGEE

SEQ ID NO: 290 - protein, 80 aa, Homo sapiens
MFQDSVAFEDVAVSFTQEEWALLDPSQKNLYRDVMQETFKNLTSVGKTWKVQNIEDEYKNPRRNLSLMREKLCESKESHH

SEQ ID NO: 291 - protein, 80 aa, Homo sapiens
AVVATLRLSAQGTVTFEDVAVKFTQEEWNLLSEAQRCLYRDVTLENLALMSSLGCWCGVEDEAAPSKQSIYIQRETQVRT

SEQ ID NO: 292 - protein, 80 aa, Homo sapiens
EEEEEDEDEDDLLTAGCQELVTFEDVAVYFSLEEWERLEADQRGLYQEVMQENYGILVSLGYPIPKPDLIFRLEQGEEPW

SEQ ID NO: 293 - protein, 80 aa, Homo sapiens
TKFQEMVTFKDVAVVFTREELGLLDLAQRKLYQDVMLENFRNLLSVGYQPFKLDVILQLGKEDKLRMMETEIQGDGCSGH

SEQ ID NO: 294 - protein, 80 aa, Homo sapiens
EEAAQKRKGKEPGMALPQGRLTFRDVAIEFSLAEWKCLNPSQRALYREVMLENYRNLEAVDISSKCMMKEVLSTGQGNTE

SEQ ID NO: 295 - protein, 80 aa, Homo sapiens
DTVVFEDVVVDFTLEEWALLNPAQRKLYRDVMLETFKHLASVDNEAQLKASGSISQQDTSGEKLSLKQKIEKFTRKNIWA

SEQ ID NO: 296 - protein, 80 aa, Homo sapiens
TTFKEGLTFKDVAVVFTEEELGLLDPVQRNLYQDVMLENFRNLLSVGHHPFKHDVFLLEKEKKLDIMKTATQRKGKSADK

SEQ ID NO: 297 - protein, 80 aa, Homo sapiens
SALQQEFWKIQTSNGIQMDLVTFDSVAVEFTQEEWTLLDPAQRNLYSDVMLENYKNLSSVGYQLFKPSLISWLEEEEELS

SEQ ID NO: 298 - protein, 80 aa, Homo sapiens
DCVIFEEVAVNFTPEEWALLDHAQRSLYRDVMLETCRNLASLDCYIYVRTSGSSSQRDVFGNGISNDEEIVKFTGSDSWS

SEQ ID NO: 299 - protein, 80 aa, Homo sapiens
ELLTFRDVTIEFSLEEWEFLNPAQQSLYRKVMLENYRNLVSLGLTVSKPELISRLEQRQEPWNVKRHETIAKPPAMSSHY

SEQ ID NO: 300 - protein, 80 aa, Homo sapiens
IKTQESLTLEDVAVEFSWEEWQLLDTAQKNLYRDVMVENYNHLVSLGYQTSKPDVLSKLAHGQEPWTTDAKIQNKNCPGI

SEQ ID NO: 301 - protein, 80 aa, Homo sapiens
PAHVPGEAGPRRTRESRPGAVSFADVAVYFSPEEWECLRPAQRALYRDVMRETFGHLGALGFSVPKPAFISWVEGEVEAW

SEQ ID NO: 302 - protein, 80 aa, Homo sapiens
GCPGDQVTPTRSLTAQLQETMTFKDVEVTFSQDEWGWLDSAQRNLYRDVMLENYRNMASLVGPFTKPALISWLEAREPWG

SEQ ID NO: 303 - protein, 80 aa, Homo sapiens
ARDLVMFRDVAVDFSQEEWECLNSYQRNLYRDVILENYSNLVSLAGCSISKPDVITLLEQGKEPWMVVRDEKRRWTLDLE

SEQ ID NO: 304 - protein, 80 aa, Homo sapiens
TTLKEAVTFKDVAVVFTEEELRLLDLAQRKLYREVMLENFRNLLSVGHQSLHRDTFHFLKEEKFWMMETATQREGNLGGK

SEQ ID NO: 305 - protein, 80 aa, Homo sapiens
SPPSPRSSMAAVALRDSAQGMTFEDVAIYFSQEEWELLDESQRFLYCDVMLENFAHVTSLGYCHGMENEAIASEQSVSIQ

SEQ ID NO: 306 - protein, 80 aa, Homo sapiens
DEEAQKRKAKESGMALPQGRLTFMDVAIEFSQEEWKSLDPGQRALYRDVMLENYRNLVFLGICLPDLSIISMLKQRREPL

SEQ ID NO: 307 - protein, 80 aa, Homo sapiens
ALTQGPLKFMDVAIEFSQEEWKCLDPAQRTLYRDVMLENYRNLVSLGICLPDLSVTSMLEQKRDPWTLQSEEKIANDPDG

SEQ ID NO: 308 - protein, 80 aa, Homo sapiens
TMFKEAVTFKDVAVVFTEEELGLLDVSQRKLYRDVMLENFRNLLSVGHQLSHRDTFHFQREEKFWIMETATQREGNSGGK

SEQ ID NO: 309 - protein, 80 aa, Homo sapiens
QGTVAFEDVAVNFSQEEWSLLSEVQRCLYHDVMLENWVLISSLGCWCGSEDEEAPSKKSISIQRVSQVSTPGAGVSPKKA

SEQ ID NO: 310 - protein, 80 aa, Homo sapiens
AEAFGDSEEDGEDVFEVEKILDMKTEGGKVLYKVRWKGYTSDDDTWEPEIHLEDCKEVLLEFRKKIAENKAKAVRKDIQR

SEQ ID NO: 311 - protein, 80 aa, Homo sapiens
VLQMQNSEHHGQSIKTQTDSISLEDVAVNFTLEEWALLDPGQRNIYRDVMRATFKNLACIGEKWKDQDIEDEHKNQGRNL

SEQ ID NO: 312 - protein, 80 aa, Homo sapiens
AMALTDPAQVSVTFDDVAVTFTQEEWGQLDLAQRTLYQEVMLENCGLLVSLGCPVPRPELIYHLEHGQEPWTRKEDLSQG

SEQ ID NO: 313 - protein, 80 aa, Homo sapiens
VHGSVTFRDVAIDFSQEEWECLQPDQRTLYRDVMLENYSHLISLGSSISKPDVITLLEQEKEPWIVVSKETSRWYPDLES

SEQ ID NO: 314 - protein, 80 aa, Homo sapiens
DPVACEDVAVNFTQEEWALLDISQRKLYREVMLETFRNLTSIGKKWKDQNIEYEYQNPRRNFRSLIEGNVNEIKEDSHCG

SEQ ID NO: 315 - protein, 80 aa, Homo sapiens
IKFQERVTFKDVAVVFTKEELALLDKAQINLYQDVMLENFRNLMLVRDGIKNNILNLQAKGLSYLSQEVLHCWQIWKQRI

SEQ ID NO: 316 - protein, 80 aa, Homo sapiens
GPLTFRDVAIEFSLKEWQCLDTAQRNLYRNVMLENYRNLVFLGITVSKPDLITCLEQGKEAWSMKRHEIMVAKPTVMCSH

SEQ ID NO: 317 - protein, 80 aa, Homo sapiens
TMSKEAVTFKDVAVVFTEEELGLLDLAQRKLYRDVMLENFRNLLSVGHQPFHRDTFHFLREEKFWMMDIATQREGNSGGK

SEQ ID NO: 318 - protein, 80 aa, Homo sapiens
GPLEFRDVAIEFSLEEWHCLDTAQQNLYRDVMLENYRHLVFLGIVVTKPDLITCLEQGKKPFTVKRHEMIAKSPVMCFHF

SEQ ID NO: 319 - protein, 80 aa, Homo sapiens
GHTEGGELVNELLKSWLKGLVTFEDVAVEFTQEEWALLDPAQRTLYRDVMLENCRNLASLGNQVDKPRLISQLEQEDKVM

SEQ ID NO: 320 - protein, 80 aa, Homo sapiens
AEPASVTVTFDDVALYFSEQEWEILEKWQKQMYKQEMKTNYETLDSLGYAFSKPDLITWMEQGRMLLISEQGCLDKTRRT

SEQ ID NO: 321 - protein, 80 aa, Homo sapiens
HSQASAISQDREEKIMSQEPLSFKDVAVVFTEEELELLDSTQRQLYQDVMQENFRNLLSVGERNPLGDKNGKDTEYIQDE

SEQ ID NO: 322 - protein, 80 aa, Homo sapiens
GSLEEGRRATGLPAAQVQEPVTFKDVAVDFTQEEWGQLDLVQRTLYRDVMLETYGHLLSVGNQIAKPEVISLLEQGEEPW

SEQ ID NO: 323 - protein, 80 aa, Homo sapiens
TTFKEAVTFKDVAVVFTEEELGLLDPAQRKLYRDVMLENFRNLLSVGHQPFHQDTCHFLREEKFWMMGTATQREGNSGGK

SEQ ID NO: 324 - protein, 80 aa, Homo sapiens
AKLYEAVTFKDVAVIFTEEELGLLDPAQRKLYRDVMLENFRNLLSVGGKIQTEMETVPEAGTHEEFSCKQIWEQIASDLT

SEQ ID NO: 325 - protein, 80 aa, Homo sapiens
RSDLFLPDSQTNEERKQYDSVAFEDVAVNFTQEEWALLGPSQKSLYRDVMWETIRNLDCIGMKWEDTNIEDQHRNPRRSL

SEQ ID NO: 326 - protein, 80 aa, Homo sapiens
PGTPGSLEMGLLTFRDVAIEFSPEEWQCLDTAQQNLYRNVMLENYRNLAFLGIALSKPDLITYLEQGKEPWNMKQHEMVD

SEQ ID NO: 327 - protein, 80 aa, Homo sapiens
TPGVRVSTDPEQVTFEDVVVGFSQEEWGQLKPAQRTLYRDVMLDTFRLLVSVGHWLPKPNVISLLEQEAELWAVESRLPQ

SEQ ID NO: 328 - protein, 80 aa, Homo sapiens
EQTQAAGMVAGWLINCYQDAVTFDDVAVDFTQEEWTLLDPSQRDLYRDVMLENYENLASVEWRLKTKGPALRQDRSWFRA

SEQ ID NO: 329 - protein, 80 aa, Homo sapiens
PSEANSIQSANATTKTSETNHTSRPRLKNVDRSTAQQLAVTVGNVTVIITDFKEKTRSSSTSSSTVTSSAGSEQQNQSSS

SEQ ID NO: 330 - protein, 80 aa, Homo sapiens
ALTQGQLSFSDVAIEFSQEEWKCLDPGQKALYRDVMLENYRNLVSLGEDNVRPEACICSGICLPDLSVTSMLEQKRDPWT

SEQ ID NO: 331 - protein, 80 aa, Homo sapiens
AAAAALRAPAQSSVTFEDVAVNFSLEEWSLLNEAQRCLYRDVMLETLTLISSLGCWHGGEDEAAPSKQSTCIHIYKDQGG

SEQ ID NO: 332 - protein, 80 aa, Homo sapiens
AQGSVSFNDVTVDFTQEEWQHLDHAQKTLYMDVMLENYCHLISVGCHMTKPDVILKLERGEEPWTSFAGHTCLEENWKAE

SEQ ID NO: 333 - protein, 80 aa, Homo sapiens
DPVAFKDVAVNFTQEEWALLDISQRKLYREVMLETFRNLTSLGKRWKDQNIEYEHQNPRRNFRSLIEEKVNEIKDDSHCG

SEQ ID NO: 334 - protein, 80 aa, Homo sapiens
SKDLVTFGDVAVNFSQEEWEWLNPAQRNLYRKVMLENYRSLVSLGVSVSKPDVISLLEQGKEPWMVKKEGTRGPCPDWEY

SEQ ID NO: 335 - protein, 80 aa, Homo sapiens
DSVAFEDVAINFTCEEWALLGPSQKSLYRDVMQETIRNLDCIGMIWQNHDIEEDQYKDLRRNLRCHMVERACEIKDNSQC

SEQ ID NO: 336 - protein, 80 aa, Homo sapiens
GPLTFMDVAIEFCLEEWQCLDIAQQNLYRNVMLENYRNLVFLGIAVSKPDLITCLEQEKEPWEPMRRHEMVAKPPVMCSH

SEQ ID NO: 337 - protein, 80 aa, Homo sapiens
QSNDIARGFERGLEPEKIIGATDSCGDLMFLMKWKDTDEADLVLAKEANVKCPQIVIAFYEERLTWHAYPEDAENKEKET

SEQ ID NO: 338 - protein, 80 aa, Homo sapiens
ALPAKDSAWPWEEKPRYLGPVTFEDVAVLFTEAEWKRLSLEQRNLYKEVMLENLRNLVSLAESKPEVHTCPSCPLAFGSQ

SEQ ID NO: 339 - protein, 80 aa, Homo sapiens
DAKSLTAWSRTLVTFKDVFVDFTREEWKLLDTAQQIVYRNVMLENYKNLVSLGYQLTKPDVILRLEKGEEPWLVEREIHQ

SEQ ID NO: 340 - protein, 80 aa, Homo sapiens
DAVAFEDVAVNFTQEEWALLGPSQKNLYRYVMQETIRNLDCIRMIWEEQNTEDQYKNPRRNLRCHMVERFSESKDSSQCG

SEQ ID NO: 341 - protein, 80 aa, Homo sapiens
EKTKVERMVEDYLASGYQDSVTFDDVAVDFTPEEWALLDTTEKYLYRDVMLENYMNLASVEWEIQPRTKRSSLQQGFLKN

SEQ ID NO: 342 - protein, 80 aa, Homo sapiens
DSVAFEDVDVNFTQEEWALLDPSQKNLYRDVMWETMRNLASIGKKWKDQNIKDHYKHRGRNLRSHMLERLYQTKDGSQRG

SEQ ID NO: 343 - protein, 80 aa, Homo sapiens
IESQEPVTFEDVAVDFTQEEWQQLNPAQKTLHRDVMLETYNHLVSVGCSGIKPDVIFKLEHGKDPWIIESELSRWIYPDR

SEQ ID NO: 344 - protein, 80 aa, Homo sapiens
AVGLCKAMSQGLVTFRDVALDFSQEEWEWLKPSQKDLYRDVMLENYRNLVWLGLSISKPNMISLLEQGKEPWMVERKMSQ

SEQ ID NO: 345 - protein, 80 aa, Homo sapiens
DKVEEEAMAPGLPTACSQEPVTFADVAVVFTPEEWVFLDSTQRSLYRDVMLENYRNLASVADQLCKPNALSYLEERGEQW

SEQ ID NO: 346 - protein, 80 aa, Homo sapiens
TFEDVAVYFSQEEWGLLDTAQRALYRHVMLENFTLVTSLGLSTSRPRVVIQLERGEEPWVPSGKDMTLARNTYGRLNSGS

SEQ ID NO: 347 - protein, 80 aa, Homo sapiens
AEPPRLPLTFEDVAIYFSEQEWQDLEAWQKELYKHVMRSNYETLVSLDDGLPKPELISWIEHGGEPFRKWRESQKSGNII

SEQ ID NO: 348 - protein, 80 aa, Homo sapiens
DSVVFEDVAVNFTQEEWALLGPSQKKLYRDVMQETFVNLASIGENWEEKNIEDHKNQGRKLRSHMVERLCERKEGSQFGE

SEQ ID NO: 349 - protein, 80 aa, Homo sapiens
AAAALRDPAQGCVTFEDVTIYFSQEEWVLLDEAQRLLYCDVMLENFALIASLGLISFRSHIVSQLEMGKEPWVPDSVDMT

SEQ ID NO: 350 - protein, 80 aa, Homo sapiens
AAPALALVSFEDVVVTFTGEEWGHLDLAQRTLYQEVMLETCRLLVSLGHPVPKPELIYLLEHGQELWTVKRGLSQSTCAG

SEQ ID NO: 351 - protein, 80 aa, Homo sapiens
IKSQESLTLEDVAVEFTWEEWQLLGPAQKDLYRDVMLENYSNLVSVGYQASKPDALFKLEQGEPWTVENEIHSQICPEIK

SEQ ID NO: 352 - protein, 80 aa, Homo sapiens
GESLESRVTLGSLTAESQELLTFKDVSVDFTQEEWGQLAPAHRNLYREVMLENYGNLVSVGCQLSKPGVISQLEKGEEPW

SEQ ID NO: 353 - protein, 80 aa, Homo sapiens
ASVALEDVAVNFTREEWALLGPCQKNLYKDVMQETIRNLDCVGMKWKDQNIEDQYRYPRKNLRCRMLERFVESKDGTQCG

SEQ ID NO: 354 - protein, 80 aa, Homo sapiens
TESQGTVTFKDVAIDFTQEEWKRLDPAQRKLYRNVMLENYNNLITVGYPFTKPDVIFKLEQEEEPWVMEEEVLRRHWQGE

SEQ ID NO: 355 - protein, 80 aa, Homo sapiens
DSVASEDVAVNFTLEEWALLDPSQKKLYRDVMRETFRNLACVGKKWEDQSIEDWYKNQGRILRNHMEEGLSESKEYDQCG

SEQ ID NO: 356 - protein, 80 aa, Homo sapiens
EETQGELTSSCGSKTMANVSLAFRDVSIDLSQEEWECLDAVQRDLYKDVMLENYSNLVSLGYTIPKPDVITLLEQEKEPW

SEQ ID NO: 357 - protein, 80 aa, Homo sapiens
AAILLTTRPKVPVSFEDVSVYFTKTEWKLLDLRQKVLYKRVMLENYSHLVSLGFSFSKPHLISQLERGEGPWVADIPRTW

SEQ ID NO: 358 - protein, 80 aa, Homo sapiens
KDKVEKEKSEKETTSKKNSHKKTRPRLKNVDRSSAQHLEVTVGDLTVIITDFKEKTKSPPASSAASADQHSQSGSSSDNT

SEQ ID NO: 359 - protein, 80 aa, Homo sapiens
GPLTFTDVAIKFSLEEWQFLDTAQQNLYRDVMLENYRNLVFLGVGVSKPDLITCLEQGKEPWNMKRHKMVAKPPVVCSHF

SEQ ID NO: 360 - protein, 80 aa, Homo sapiens
RKPNPQAMAALFLSAPPQAEVTFEDVAVYLSREEWGRLGPAQRGLYRDVMLETYGNLVSLGVGPAGPKPGVISQLERGDE

SEQ ID NO: 361 - protein, 80 aa, Homo sapiens
LSLSPILLYTCEMFQDPVAFKDVAVNFTQEEWALLDISQKNLYREVMLETFWNLTSIGKKWKDQNIEYEYQNPRRNFRSV

SEQ ID NO: 362 - protein, 80 aa, Homo sapiens
AAGEPRSLLFFQKPVTFEDVAVNFTQEEWDCLDASQRVLYQDVMSETFKNLTSVARIFLHKPELITKLEQEEEQWRETRV

SEQ ID NO: 363 - protein, 80 aa, Homo sapiens
AAMPLKAQYQEMVTFEDVAVHFTKTEWTGLSPAQRALYRSVMLENFGNLTALGYPVPKPALISLLERGDMAWGLEAQDDP

SEQ ID NO: 364 - protein, 80 aa, Homo sapiens
ARVPLTFSDVAIDFSQEEWEYLNSDQRDLYRDVMLENYTNLVSLDFNFTTESNKLSSEKRNYEVNAYHQETWKRNKTFNL

SEQ ID NO: 365 - protein, 80 aa, Homo sapiens
ASRLPTAWSCEPVTFEDVTLGFTPEEWGLLDLKQKSLYREVMLENYRNLVSVEHQLSKPDVVSQLEEAEDFWPVERGIPQ

SEQ ID NO: 366 - protein, 80 aa, Homo sapiens
SKKKRDAADKPRGFARGLDPERIIGATDSSGELMFLMKWKDSDEADLVLAKEANMKCPQIVIAFYEERLTWHSCPEDEAQ

SEQ ID NO: 367 - protein, 80 aa, Homo sapiens
AHKYVGLQYHGSVTFEDVAIAFSQQEWESLDSSQRGLYRDVMLENYRNLVSMGHSRSKPHVIALLEQWKEPEVTVRKDGR

SEQ ID NO: 368 - protein, 80 aa, Homo sapiens
AAARLLPVPAGPQPLSFQAKLTFEDVAVLLSQDEWDRLCPAQRGLYRNVMMETYGNVVSLGLPGSKPDIISQLERGEDPW

SEQ ID NO: 369 - protein, 80 aa, Homo sapiens
AVGLLKAMYQELVTFRDVAVDFSQEEWDCLDSSQRHLYSNVMLENYRILVSLGLCFSKPSVILLLEQGKAPWMVKRELTK

SEQ ID NO: 370 - protein, 80 aa, Homo sapiens
GLLTFRDVAIEFSLEEWQCLDTAQRNLYKNVILENYRNLVFLGIAVSKQDLITCLEQEKEPLTVKRHEMVNEPPVMCSHF

SEQ ID NO: 371 - protein, 80 aa, Homo sapiens
GLLAFRDVALEFSPEEWECLDPAQRSLYRDVMLENYRNLISLGEDSFNMQFLFHSLAMSKPELIICLEARKEPWNVNTEK

SEQ ID NO: 372 - protein, 80 aa, Homo sapiens
NLTEGRVVFEDVAIYFSQEEWGHLDEAQRLLYRDVMLENLALLSSLGSWHGAEDEEAPSQQGFSVGVSEVTASKPCLSSQ

SEQ ID NO: 373 - protein, 80 aa, Homo sapiens
GPAQHTSWPCGSAVPTLKSMVTFEDVAVYFSQEEWELLDAAQRHLYHSVMLENLELVTSLGSWHGVEGEGAHPKQNVSVE

SEQ ID NO: 374 - protein, 80 aa, Homo sapiens
SGYPGAERNLLEYSYFEKGPLTFRDVVIEFSQEEWQCLDTAQQDLYRKVMLENFRNLVFLGIDVSKPDLITCLEQGKDPW

SEQ ID NO: 375 - protein, 80 aa, Homo sapiens
ARKLVMFRDVAIDFSQEEWECLDSAQRDLYRDVMLENYSNLVSLDLPSRCASKDLSPEKNTYETELSQWEMSDRLENCDL

SEQ ID NO: 376 - protein, 80 aa, Homo sapiens
GPLQFRDVAIEFSLEEWHCLDTAQRNLYRNVMLENYSNLVFLGITVSKPDLITCLEQGRKPLTMKRNEMIAKPSVMCSHF

SEQ ID NO: 377 - protein, 80 aa, Homo sapiens
VAGWLTNYSQDSVTFEDVAVDFTQEEWTLLDQTQRNLYRDVMLENYKNLVAVDWESHINTKWSAPQQNFLQGKTSSVVEM

SEQ ID NO: 378 - protein, 80 aa, Homo sapiens
AAAWMAPAQESVTFEDVAVTFTQEEWGQLDVTQRALYVEVMLETCGLLVALGDSTKPETVEPIPSHLALPEEVSLQEQLA

SEQ ID NO: 379 - protein, 80 aa, Homo sapiens
VLEWLFISQEQPKITKSWGPLSFMDVFVDFTWEEWQLLDPAQKCLYRSVMLENYSNLVSLGYQHTKPDIIFKLEQGEELC

SEQ ID NO: 380 - protein, 80 aa, Homo sapiens
AAAVLMDRVQSCVTFEDVFVYFSREEWELLEEAQRFLYRDVMLENFALVATLGFWCEAEHEAPSEQSVSVEGVSQVRTAE

SEQ ID NO: 381 - protein, 80 aa, Homo sapiens
AGSQFPDFKHLGTFLVFEELVTFEDVLVDFSPEELSSLSAAQRNLYREVMLENYRNLVSLGHQFSKPDIISRLEEEESYA

SEQ ID NO: 382 - protein, 80 aa, Homo sapiens
IQSQISFEDVAVDFTLEEWQLLNPTQKNLYRDVMLENYSNLVFLEVWLDNPKMWLRDNQDNLKSMERGHKYDVFGKIFNS

SEQ ID NO: 383 - protein, 80 aa, Homo sapiens
DLVAFEDVAVNFTQEEWSLLDPSQKNLYREVMQETLRNLASIGEKWKDQNIEDQYKNPRNNLRSLLGERVDENTEENHCG

SEQ ID NO: 384 - protein, 80 aa, Homo sapiens
KDEDIKLRVIGQDSSEIHFKVKMTTPLKKLKKSYCQRQGVPVNSLRFLFEGQRIADNHTPEELGMEEEDVIEVYQEQIGG

SEQ ID NO: 385 - protein, 80 aa, Homo sapiens
DSVAFEDVAVNFTQEEWALLSPSQKNLYRDVTLETFRNLASVGIQWKDQDIENLYQNLGIKLRSLVERLCGRKEGNEHRE

SEQ ID NO: 386 - protein, 80 aa, Homo sapiens
RNFWILRLPPGSKGEAPKVPVTFDDVAVYFSELEWGKLEDWQKELYKHVMRGNYETLVSLDYAISKPDILTRIERGEEPC

SEQ ID NO: 387 - protein, 80 aa, Homo sapiens
AAAAPRRPTQQGTVTFEDVAVNFSQEEWCLLSEAQRCLYRDVMLENLALISSLGCWCGSKDEEAPCKQRISVQRESQSRT

SEQ ID NO: 388 - protein, 80 aa, Homo sapiens
SGEDSGSFYSWQKAKREQGLVTFEDVAVDFTQEEWQYLNPPQRTLYRDVMLETYSNLVFVGQQVTKPNLILKLEVEECPA

SEQ ID NO: 389 - protein, 80 aa, Homo sapiens
DSVAFEDVAVNFTQEEWALLGPSQKSLYRNVMQETIRNLDCIEMKWEDQNIGDQCQNAKRNLRSHTCEIKDDSQCGETFG

SEQ ID NO: 390 - protein, 80 aa, Homo sapiens
AAGWLTTWSQNSVTFQEVAVDFSQEEWALLDPAQKNLYKDVMLENFRNLASVGYQLCRHSLISKVDQEQLKTDERGILQG

SEQ ID NO: 391 - protein, 80 aa, Homo sapiens
ENPRNQLMALMLLTAQPQELVMFEEVSVCFTSEEWACLGPIQRALYWDVMLENYGNVTSLEWETMTENEEVTSKPSSSQR

SEQ ID NO: 392 - protein, 80 aa, Homo sapiens
LETYNSLVSLQELVSFEEVAVHFTWEEWQDLDDAQRTLYRDVMLETYSSLVSLGHCITKPEMIFKLEQGAEPWIVEETPN

SEQ ID NO: 393 - protein, 80 aa, Homo sapiens
RHFRRPEPCREPLASPIQDSVAFEDVAVNFTQEEWALLDSSQKNLYREVMQETCRNLASVGSQWKDQNIEDHFEKPGKDI

SEQ ID NO: 394 - protein, 80 aa, Homo sapiens
AAAELTAPAQGIVTFEDVAVYFSWKEWGLLDEAQKCLYHDVMLENLTLTTSLGGSGAGDEEAPYQQSTSPQRVSQVRIPK

SEQ ID NO: 395 - protein, 80 aa, Homo sapiens
AATFQLPGHQEMPLTFQDVAVYFSQAEGRQLGPQQRALYRDVMLENYGNVASLGFPVPKPELISQLEQGKELWVLNLLGA

SEQ ID NO: 396 - protein, 80 aa, Homo sapiens
RSEAGEPPSSLQVKPETPASAAVAVAAAAAPTTTAEKPPAEAQDEPAESLSEFKPFFGNIIITDVTANCLTVTFKEYVTV

SEQ ID NO: 397 - protein, 80 aa, Homo sapiens
HRTTRIKITELNPHLMCALCGGYFIDATTIVECLHSFCKTCIVRYLETNKYCPMCDVQVHKTRPLLSIRSDKTLQDIVYK

SEQ ID NO: 398 - protein, 80 aa, Homo sapiens
ASQEFEVEAIVDKRQDKNGNTQYLVRWKGYDKQDDTWEPEQHLMNCEKCVHDFNRRQTEKQKKLTWTTTSRIFSNNARRR

SEQ ID NO: 399 - protein, 80 aa, Homo sapiens
ASGDLYEVERIVDKRKNKKGKWEYLIRWKGYGSTEDTWEPEHHLLHCEEFIDEFNGLHMSKDKRIKSGKQSSTSKLLRDS

SEQ ID NO: 400 - protein, 80 aa, Homo sapiens
TLIRKADLENHNKDGGFWTVIDGKVYDIKDFQTQSLTGNSILAQFAGEDPVVALEAALQFEDTRESMHAFCVGQYLEPDQ

SEQ ID NO: 401 - protein, 80 aa, Homo sapiens
EKTKIGTMVEDHRSNSYQDSVTFDDVAVEFTPEEWALLDTTQKYLYRDVMLENYMNLASVDFFFCLTSEWEIQPRTKRSS

SEQ ID NO: 402 - protein, 80 aa, Homo sapiens
AHELVMFRDVAIDVSQEEWECLNPAQRNLYKEVMLENYSNLVSLGLSVSKPAVISSLEQGKEPWMVVREETGRWCPGTWK

SEQ ID NO: 403 - protein, 80 aa, Homo sapiens
AFEDVAVYFSQEEWGLLDTAQRALYRRVMLDNFALVASLGLSTSRPRVVIQLERGEEPWVPSGTDTTLSRTTYRRRNPGS

SEQ ID NO: 404 - protein, 80 aa, Homo sapiens
AQLRRGHLTFRDVAIEFSQEEWKCLDPVQKALYRDVMLENYRNLVSLGICLPDLSIISMMKQRTEPWTVENEMKVAKNPD

SEQ ID NO: 405 - protein, 80 aa, Homo sapiens
SDHSLGISRSKTPVDDPMSLLYNMNDCYSKLKELVPSIPQNKKVSKMEILQHVIDYILDLQIALDSHPTIVSLHHQRPGQ

SEQ ID NO: 406 - protein, 80 aa, Homo sapiens
KDPNEPQKPVSAYALFFRDTQAAIKGQNPNATFGEVSKIVASMWDGLGEEQKQVYKKKTEAAKKEYLKQLAAYRASLVSK

SEQ ID NO: 407 - protein, 80 aa, Homo sapiens
QEEKQEDAAICPVTVLPEEPVTFQDVAVDFSREEWGLLGPTQRTEYRDVMLETFGHLVSVGWETTLENKELAPNSDIPEE

SEQ ID NO: 408 - protein, 80 aa, Homo sapiens
DASRLSGRDPSSWTVEDVMQFVREADPQLGPHADLFRKHEIDGKALLLLRSDMMMKYMGLKLGPALKLSYHIDRLKQGKF

SEQ ID NO: 409 - protein, 80 aa, Homo sapiens
AVTFEDVTIIFTWEEWKFLDSSQKRLYREVMWENYTNVMSVENWNESYKSQEEKFRYLEYENFSYWQGWWNAGAQMYENQ

SEQ ID NO: 410 - protein, 80 aa, Homo sapiens
ELSAIGEQVFAVESIRKKRVRKGKVEYLVKWKGWPPKYSTWEPEEHILDPRLVMAYEEKEERDRASGYRKRGPKPKRLLL

SEQ ID NO: 411 - protein, 80 aa, Homo sapiens
GGAGARLPALLDEQQVNVLLYDMNGCYSRLKELVPTLPQNRKVSKVEILQHVIDYIRDLQLELNSESEVGTPGGRGLPVR

SEQ ID NO: 412 - protein, 80 aa, Homo sapiens
VVMAASPGSLHSPQQLAEEATRKRELRLMKNREAAKECRRRKKEYVKCLESRVAVLEVQNKKLIEELETLKDICSPKTDY

SEQ ID NO: 413 - protein, 80 aa, Homo sapiens
GGGPGGRPGREPRQRHTANARERDRTNSVNTAFTALRTLIPTEPADRKLSKIETLRLASSYISHLGNVLLAGEACGDGQP

SEQ ID NO: 414 - protein, 80 aa, Homo sapiens
SGFGYSLPQQQPAAVARRNERERNRVKLVNLGFATLREHVPNGAANKKMSKVETLRSAVEYIRALQQLLDEHDAVSAAFQ

SEQ ID NO: 415 - protein, 80 aa, Homo sapiens
APLPPRDPNGAGPEWREPGAVSFADVAVYFCREEWGCLRPAQRALYRDVMRETYGHLSALGIGGNKPALISWVEEEAELW

SEQ ID NO: 416 - protein, 80 aa, Homo sapiens
KQGFSKDPSTWSVDEVIQFMKHTDPQISGPLADLFRQHEIDGKALFLLKSDVMMKYMGLKLGPALKLCYYIEKLKEGKYS

SEQ ID NO: 417 - protein, 80 aa, Homo sapiens
SGGGSPQSYEELQTQRVMANVRERQRTQSLNEAFAALRKIIPTLPSDKLSKIQTLKLAARYIDFLYQVLQSDELDSKMAS

SEQ ID NO: 418 - protein, 80 aa, Homo sapiens
IAPGVVMASSPALPTQPAEEAARKREVRLMKNREAARECRRKKKEYVKCLENRVAVLENQNKTLIEELKALKDLYCHKSD

SEQ ID NO: 419 - protein, 80 aa, Homo sapiens
SRIPVSKSQPVTPEKHRARKRQAWLWEEDKNLRSGVRKYGEGNWSKILLHYKFNNRTSVMLKDRWRTMKKLKLISSDSED

SEQ ID NO: 420 - protein, 80 aa, Homo sapiens
SLAIARGRGKGPAAEEPLSLLDDMNHCYSRLRELVPGVPRGTQLSQVEILQRVIDYILDLQVVLAEPAPGPPDGPHLPIQ

SEQ ID NO: 421 - protein, 80 aa, Homo sapiens
GSGPPSSGGGLYRDMGAQGGRPSLIARIPVARILGDPEEESWSPSLTNLEKVVVTDVTSNFLTVTIKESNTDQGFFKEKR

SEQ ID NO: 422 - protein, 80 aa, Homo sapiens
ELPAVGEHVFAVESIEKKRIRKGRVEYLVKWRGWSPKYNTWEPEENILDPRLLIAFQNRERQEQLMGYRKRGPKPKPLVV

SEQ ID NO: 423 - protein, 80 aa, Homo sapiens
VDSSSNQLPSSKRMRTAFTSTQLLELEREFASNMYLSRLRRIEIATYLNLSEKQVKIWFQNRRVKHKKEGKGSNHRGGGG

SEQ ID NO: 424 - protein, 80 aa, Homo sapiens
TPGGGGDAGKKRKRRVLFSKAQTYELERRFRQQRYLSAPEREHLASLIRLTPTQVKIWFQNHRYKMKRARAEKGMEVTPL

SEQ ID NO: 425 - protein, 80 aa, Homo sapiens
QTVVMTSPVTLTSQTTKTDDPQLKREIRLMKNREAARECRRKKKEYVKCLENRVAVLENQNKTLIEELKTLKDLYSNKSV

SEQ ID NO: 426 - protein, 80 aa, Homo sapiens
KGSPSAQSFEELQSQRILANVRERQRTQSLNEAFAALRKIIPTLPSDKLSKIQTLKLAARYIDFLYQVLQSDEMDNKMTS

SEQ ID NO: 427 - protein, 80 aa, Homo sapiens
NLTEDYMVFEDVAIHFSQEEWGILNDVQRHLHSDVMLENFALLSSVGCWHGAKDEEAPSKQCVSVGVSQVTTLKPALSTQ

SEQ ID NO: 428 - protein, 80 aa, Homo sapiens
KDPNEPQKPVSAYALFFRDTQAAIKGQNPNATFGEVSKIVASMWDSLGEEQKQVYKRKTEAAKKEYLKALAAYRASLVSK

SEQ ID NO: 429 - protein, 80 aa, Homo sapiens
KDPNEPQKPVSAYALFFRDTQAAIKGQNPNATFGEVSKIVASMWDSLGEEQKQVYKRKTEAAKKEYLKALAAYKDNQECQ

SEQ ID NO: 430 - protein, 80 aa, Homo sapiens
LDGSTWDFCSEDCKSKYLLWYCKAARCHACKRQGKLLETIHWRGQIRHFCNQQCLLRFYSQQNQPNLDTQSGPESLLNSQ

SEQ ID NO: 431 - protein, 80 aa, Homo sapiens
ASVQASRRQWCYLCDLPKMPWAMVWDFSEAVCRGCVNFEGADRIELLIDAARQLKRSHVLPEGRSPGPPALKHPATKDLA

SEQ ID NO: 432 - protein, 80 aa, Homo sapiens
MEGPQPENMQPRTRRTKFTLLQVEELESVFRHTQYPDVPTRRELAENLGVTEDKVRVWFKNKRARCRRHQRELMLANELR

SEQ ID NO: 433 - protein, 80 aa, Homo sapiens
PKIMPKKPAEEGNDSEEVPEASGPQNDGKELCPPGKPTTSEKIHERSGPKRGEHAWTHRLRERKQLVIYEEISDPEEDDE

SEQ ID NO: 434 - protein, 80 aa, Homo sapiens
SAAQVSSSRRQSCYLCDLPRMPWAMIWDFSEPVCRGCVNYEGADRIEFVIETARQLKRAHGCFQDGRSPGPPPPVGVKTV

SEQ ID NO: 435 - protein, 80 aa, Homo sapiens
PGPPGSLEMGPLTFRDVAIEFSLEEWQCLDTAQRNLYRKVMFENYRNLVFLGIAVSKPHLITCLEQGKEPWNRKRQEMVA

SEQ ID NO: 436 - protein, 80 aa, Homo sapiens
NKKKVEEVLEEEEEEYVVEKVLDRRVVKGKVEYLLKWKGFSDEDNTWEPEENLDCPDLIAEFLQSQKTAHETDKSEGGKR

SEQ ID NO: 437 - protein, 80 aa, Homo sapiens
LANVVEKVRLLRLHPGMGLKGDLCERHGEKLKMFCKEDVLIMCEACSQSPEHEAHSVVPMEDVAWEYKWELHEALEHLKK

SEQ ID NO: 438 - protein, 80 aa, Homo sapiens [sequence omitted]

SEQ ID NO: 439 - protein, 80 aa, Homo sapiens
ENSDLLPVAQTEPSIWTVDDVWAFIHSLPGCQDIADEFRAQEIDGQALLLLKEDHLMSAMNIKLGPALKICARINSLKES

SEQ ID NO: 440 - protein, 80 aa, Homo sapiens
AGPGGGSRSGSGRPAAANAARERSRVQTLRHAFLELQRTLPSVPPDTKLSKLDVLLLATTYIAHLTRSLQDDAEAPADAG

SEQ ID NO: 441 - protein, 80 aa, Homo sapiens
QNGKSKKVEEAEPEEFVVEKVLDRRVVNGKVEYFLKWKGFTDADNTWEPEENLDCPELIEAFLNSQKAGKEKDGTKRKSL

SEQ ID NO: 442 - protein, 80 aa, Homo sapiens
QHPPDACAFRRGRKKRIPYSKGQLRELEREYAANKFITKDKRRKISAATSLSERQITIWFQNRRVKEKKVLAKVKNSATP

SEQ ID NO: 443 - protein, 80 aa, Homo sapiens
SMSPTTSSQILARKRRRGIIEKRRRDRINNSLSELRRLVPSAFEKQGSAKLEKAEILQMTVDHLKMLHTAGGKGYFDAHA

SEQ ID NO: 444 - protein, 80 aa, Homo sapiens
LVGMGHHFLPSEPTKWNVEDVYEFIRSLPGCQEIAEEFRAQEIDGQALLLLKEDHLMSAMNIKLGPALKIYARISMLKDS

SEQ ID NO: 445 - protein, 80 aa, Homo sapiens
PANEDAPQPGEHGSACEVSVSFEDVTVDFSREEWQQLDSTQRRLYQDVMLENYSHLLSVGFEVPKPEVIFKLEQGEGPWT

SEQ ID NO: 446 - protein, 80 aa, Homo sapiens
GYSSTENLQLVLERRRVANAKERERIKNLNRGFARLKALVPFLPQSRKPSKVDILKGATEYIQVLSDLLEGAKDSKKQDP

SEQ ID NO: 447 - protein, 80 aa, Homo sapiens
EEAPAPEDVTKWTVDDVCSFVGGLSGCGEYTRVFREQGIDGETLPLLTEEHLLTNMGLKLGPALKIRAQVARRLGRVFYV

SEQ ID NO: 448 - protein, 80 aa, Homo sapiens
GGTLAHTPRRSLPSHHGKKMRMARCGHCRGCLRVQDCGSCVNCLDKPKFGGPNTKKQCCVYRKCDKIEARKMERLAKKGR

SEQ ID NO: 449 - protein, 80 aa, Homo sapiens
LNSPTTTSQIMARKKRRGIIEKRRRDRINNSLSELRRLVPTAFEKQGSAKLEKAEILQMTVDHLKMLQATGGKGYFDAHA

SEQ ID NO: 450 - protein, 80 aa, Homo sapiens
QPVKSELDEEEERRKRRREKNKVAAARCRNKKKERTEFLQRESERLELMNAELKTQIEELKQERQQLILMLNRHRPTCIV

SEQ ID NO: 451 - protein, 80 aa, Homo sapiens
LQPEVSSYRRGRKKRVPYTKVQLKELEKEYAASKFITKEKRRRISATTNLSERQVTIWFQNRRVKEKKVVSKSKAPHLHS

SEQ ID NO: 452 - protein, 80 aa, Homo sapiens
LPVPLDSAFEPAFLRKRNERERQRVRCVNEGYARLRDHLPRELADKRLSKVETLRAAIDYIKHLQELLERQAWGLEGAAG

SEQ ID NO: 453 - protein, 80 aa, Homo sapiens
SPFLQRPLHKRKGGQVRFSNDQTIELEKKFETQKYLSPPERKRLAKMLQLSERQVKTWFQNRRAKWRRLKQENPQSNKKE

SEQ ID NO: 454 - protein, 80 aa, Homo sapiens
IAIATGSLHCVCCTEDGEVYTWGDNDEGQLGDGTTNAIQRPRLVAALQGKKVNRVACGSAHTLAWSTSKPASAGKLPAQV

SEQ ID NO: 455 - protein, 80 aa, Homo sapiens
GGSDASQVPNGKRMRTAFTSTQLLELEREFSSNMYLSRLRRIEIATYLNLSEKQVKIWFQNRRVKHKKEGKGTQRNSHAG

SEQ ID NO: 456 - protein, 80 aa, Homo sapiens
RLDLPPGFMFKVQAQHDYTATDTDELQLKAGDVVLVIPFQNPEEQDEGWLMGVKESDWNQHKELEKCRGVFPENFTERVP

SEQ ID NO: 457 - protein, 80 aa, Homo sapiens
GICKLPGRLRIQPALWSREDVLHWLRWAEQEYSLPCTAEHGFEMNGRALCILTKDDFRHRAPSSGDVLYELLQYIKTQRR

SEQ ID NO: 458 - protein, 80 aa, Homo sapiens
PNYRGCEYSYGPAFTRKRNERERQRVKCVNEGYAQLRHHLPEEYLEKRLSKVETLRAAIKYINYLQSLLYPDKAETKNNP

SEQ ID NO: 459 - protein, 80 aa, Homo sapiens
LHGINPVFLSSNPSRWSVEEVYEFIASLQGCQEIAEEFRSQEIDGQALLLLKEEHLMSAMNIKLGPALKICAKINVLKET

SEQ ID NO: 460 - protein, 80 aa, Homo sapiens
QAGQQQGQQKQKRHRTRFTPAQLNELERSFAKTHYPDIFMREELALRIGLTESRVQVWFQNRRAKWKKRKKTTNVFRAPG

SEQ ID NO: 461 - protein, 80 aa, Homo sapiens
AAAVAVAAASRRQSCYLCDLPRMPWAMIWDFTEPVCRGCVNYEGADRVEFVIETARQLKRAHGCFPEGRSPPGAAASAAA

SEQ ID NO: 462 - protein, 80 aa, Homo sapiens
FSSQTPASIKEEEGSPEKERPPEAEYINSRCVLFTYFQGDISSVVDEHFSRALSQPSSYSPSCTSSKAPRSSGPWRDCSF

SEQ ID NO: 463 - protein, 80 aa, Homo sapiens
DKAGGSSGQRTRKKRCPYTKYQIRELEREFFFSVYINKEKRLQLSRMLNLTDRQVKIWFQNRRMKEKKINRDRLQYYSAN

SEQ ID NO: 464 - protein, 80 aa, Homo sapiens
GAPLSGLQGLPECTRCGHGIVGTIVKARDKLYHPECFMCSDCGLNLKQRGYFFLDERLYCESHAKARVKPPEGYDVVAVY

SEQ ID NO: 465 - protein, 80 aa, Homo sapiens
RRPATAETGGGAAAVARRNERERNRVKLVNLGFQALRQHVPHGGASKKLSKVETLRSAVEYIRALQRLLAEHDAVRNALA

SEQ ID NO: 466 - protein, 80 aa, Homo sapiens
TVQVTGKTRTKEKYRVVYTDHQRLELEKEFHCNRYITIQRKSELAVNLGLSERQVKIWFQNRRAKERKMIKKKISQFENS

SEQ ID NO: 467 - protein, 80 aa, Homo sapiens
EEAAQKRKEKEPGMALPQGHLTFRDVAIEFSLEEWKCLDPTQRALYRAMMLENYRNLHSVDISSKCMMKKFSSTAQGNTE

SEQ ID NO: 468 - protein, 80 aa, Homo sapiens
DIRASQVARWTVDEVAEFVQSLLGCEEHAKCFKKEQIDGKAFLLLTQTDIVKVMKIKLGPALKIYNSILMFRHSQELPEE

SEQ ID NO: 469 - protein, 80 aa, Homo sapiens
LSPLEGTKMTVNNLHPRVTEEDIVELFCVCGALKRARLVHPGVAEVVFVKKDDAITAYKKYNNRCLDGQPMKCNLHMNGN

SEQ ID NO: 470 - protein, 80 aa, Homo sapiens
DNAERPRARRRRKPRVLFSQAQVYELERRFKQQRYLSAPERDQLASVLKLTSTQVKIWFQNRRYKCKRQRQDQTLELVGL

SEQ ID NO: 471 - protein, 80 aa, Homo sapiens
SQVKSKAKKTVDKHSDEYKIRRERNNIAVRKSRDKAKMRNLETQHKVLELTAENERLQKKVEQLSRELSTLRNLFKQLPE

SEQ ID NO: 472 - protein, 80 aa, Homo sapiens
KRDYIRLYGIKCAKCSIGFSKNDFVMRARSKVYHIECFRCVACSRQLIPGDEFALREDGLFCRADHDVVERASLGAGDPL

SEQ ID NO: 473 - protein, 80 aa, Homo sapiens
SLGSQVKTRTKDKYRVVYTDHQRLELEKEFHYSRYITIRRKAELAATLGLSERQVKIWFQNRRAKERKINKKKLQQQQQQ

SEQ ID NO: 474 - protein, 80 aa, Homo sapiens
QGGQRGRPHSRRRHRTTFSPVQLEQLESAFGRNQYPDIWARESLARDTGLSEARIQVWFQNRRAKQRKQERSLLQPLAHL

SEQ ID NO: 475 - protein, 80 aa, Homo sapiens
DALTYLDQVKIRFGSDPATYNGFLEIMKEFKSQSIDTPGVIRRVSQLFHEHPDLIVGFNAFLPLGYRIDIPKNGKLNIQS

SEQ ID NO: 476 - protein, 80 aa, Homo sapiens
RLHLDSNPLKWSVADVVRFIRSTDCAPLARIFLDQEIDGQALLLLTLPTVQECMDLKLGPAIKLCHHIERIKFAFYEQFA

SEQ ID NO: 477 - protein, 80 aa, Homo sapiens
AKGAAPNAPRTRKKRCPYSKFQIRELEREFFFNVYINKEKRLQLSRMLNLTDRQVKIWFQNRRMKEKKLSRDRLQYFSGN

SEQ ID NO: 478 - protein, 80 aa, Homo sapiens
TTGNWLTAKSGRKKRCPYTKHQTLELEKEFLFNMYLTRERRLEISKTINLTDRQVKIWFQNRRMKLKKMNRENRIRELTS

SEQ ID NO: 479 - protein, 80 aa, Homo sapiens
YLVSNVIELLDVDPNDQEEDGANIDLDSQRKGKCAVIKTSTRQTYFLPVIGLVDAEKLKPGDLVGVNKDSYLILETLPTE

SEQ ID NO: 480 - protein, 80 aa, Homo sapiens
KASPTLGKRKKRRHRTVFTAHQLEELEKAFSEAHYPDVYAREMLAVKTELPEDRIQVWFQNRRAKWRKREKRWGGSSVMA

SEQ ID NO: 481 - protein, 80 aa, Homo sapiens
EESERPKPRSRRKPRVLFSQAQVFELERRFKQQRYLSAPEREHLASSLKLTSTQVKIWFQNRRYKCKRQRQDKSLELGAH

SEQ ID NO: 482 - protein, 80 aa, Homo sapiens
VVPGSRQEEVIDHKLTEREWAEEWKHLNNLLNCIMDMVEKTRRSLTVLRRCQEADREELNHWARRYSDAEDTKKGPAPAA

SEQ ID NO: 483 - protein, 80 aa, Homo sapiens
ESPEKKPACRKKKTRTVFSRSQVFQLESTFDMKRYLSSSERAGLAASLHLTETQVKIWFQNRRNKWKRQLAAELEAANLS

SEQ ID NO: 484 - protein, 80 aa, Homo sapiens
RGGVGVGGGRKKKTRTVFSRSQVFQLESTFDLKRYLSSAERAGLAASLQLTETQVKIWFQNRRNKWKRQLAAELEAASLS

SEQ ID NO: 485 - protein, 80 aa, Homo sapiens
ELLAHGRQKILDLLNEGSARDLRSLQRIGPKKAQLIVGWRELHGPFSQVEDLERVEGITGKQMESFLKANILGLAAGQRC

SEQ ID NO: 486 - protein, 80 aa, Homo sapiens
ESPYGETISPEDAPESISKAVASLPPEQMFELMKQMKLCVQNSPQEARNMLLQNPQLAYALLQAQVVMRIVDPEIALKIL

SEQ ID NO: 487 - protein, 80 aa, Homo sapiens
AGPLHKGKKAVNKDSLEYRLRRERNNIAVRKSRDKAKRRILETQQKVLEYMAENERLRSRVEQLTQELDTLRNLFRQIPE

SEQ ID NO: 488 - protein, 80 aa, Homo sapiens
IRIVNGKPKKVRKPRTIYSSFQLAALQRRFQKTQYLALPERAELAASLGLTQTQVKIWFQNRRSKFKKMWKSGEIPSEQH

SEQ ID NO: 489 - protein, 80 aa, Homo sapiens
TVYQFCSPSCWTKFQRTSPEGGIHLSCHYCHSLFSGKPEVLDWQDQVFQFCCRDCCEDFKRLRGVVSQCEHCRQEKLLHE

SEQ ID NO: 490 - protein, 80 aa, Homo sapiens
TMVDTEMPFWPTNFGISSVDLSVMEDHSHSFDIKPFTTVDFSSISTPHYEDIPFTRTDPVVADYKYDLKLQEYQSAIKVE

SEQ ID NO: 491 - protein, 80 aa, Homo sapiens
GRHHAELLKPRCSACDEIIFADECTEAEGRHWHMKHFCCLECETVLGGQRYIMKDGRPFCCGCFESLYAEYCETCGEHIG

SEQ ID NO: 492 - protein, 80 aa, Homo sapiens
DPDKESPGCKRRRTRTNFTGWQLEELEKAFNESHYPDVFMREALALRLDLVESRVQVWFQNRRAKWRKKENTKKGPGRPA

SEQ ID NO: 493 - protein, 80 aa, Homo sapiens
TEQPTPRQKKPRRSRTIFTELQLMGLEKKFQKQKYLSTPDRLDLAQSLGLTQLQVKTWYQNRRMKWKKMVLKGGQEAPTK

SEQ ID NO: 494 - protein, 80 aa, Homo sapiens
SMELAKNKSKKRRNRTTFSTFQLEELEKVFQKTHYPDVYAREQLALRTDLTEARVQVWFQNRRAKWRKRERYGKIQEGRN

SEQ ID NO: 495 - protein, 80 aa, Homo sapiens
GGGGGAGPVVVVRQRQAANARERDRTQSVNTAFTALRTLIPTEPVDRKLSKIETVRLASSYIAHLANVLLLGDSADDGQP

SEQ ID NO: 496 - protein, 80 aa, Homo sapiens
IDDTVEGITGNLFEVYLKPYFLEAYRPIRKGDIFLVRGGMRAVEFKVVETDPSPYCIVAPDTVIHCEGEPIKREDEEESL

SEQ ID NO: 497 - protein, 80 aa, Homo sapiens
SALNQTKKRKKRRHRTIFTSYQLEELEKAFNEAHYPDVYAREMLAMKTELPEDRIQVWFQNRRAKWRKREKCWGRSSVMA

SEQ ID NO: 498 - protein, 80 aa, Homo sapiens
DGLPWGAAPGRARKKRKPYTKQQIAELENEFLVNEFINRQKRKELSNRLNLSDQQVKIWFQNRRMKKKRVVLREQALALY

SEQ ID NO: 499 - protein, 80 aa, Homo sapiens
GGGGSGKTRTKDKYRVVYTDHQRLELEKEFHYSRYITIRRKSELAANLGLTERQVKIWFQNRRAKERKVNKKKQQQQQPP

SEQ ID NO: 500 - protein, 80 aa, Homo sapiens
TRAGGLALGRSEASPENAARERSRVRTLRQAFLALQAALPAVPPDTKLSKLDVLVLAASYIAHLTRTLGHELPGPAWPPF

SEQ ID NO: 501 - protein, 80 aa, Homo sapiens
KCDSNVSSSKKRRHRTTFTSLQLEELEKVFQKTHYPDVYVREQLALRTELTEARVQVWFQNRRAKWRKRERYGQIQQAKS

SEQ ID NO: 502 - protein, 80 aa, Homo sapiens
NAANWLTAKSGRKKRCPYTKHQTLELEKEFLFNMYLTRERRLEISRSVHLTDRQVKIWFQNRRMKLKKMNRENRIRELTA

SEQ ID NO: 503 - protein, 80 aa, Homo sapiens
LSEEEQPKKKHRRNRTTFTTYQLHELERAFEKSHYPDVYSREELAGKVNLPEVRVQVWFQNRRAKWRRQEKLEVSSMKLQ

SEQ ID NO: 504 - protein, 80 aa, Homo sapiens
HMAGLAEYPMQGELASAISSGKKKRKRCGMCAPCRRRINCEQCSSCRNRKTGHQICKFRKCEELKKKPSAALEKVMLPTG

SEQ ID NO: 505 - protein, 80 aa, Homo sapiens
SITKHPSTWSVEAVVLFLKQTDPLALCPLVDLFRSHEIDGKALLLLTSDVLLKHLGVKLGTAVKLCYYIDRLKQGKCFEN

SEQ ID NO: 506 - protein, 80 aa, Homo sapiens
ACRRKREFIPDEKKDAMYWEKRRKNNEAAKRSREKRRLNDLVLENKLIALGEENATLKAELLSLKLKFGLISSTAYAQEI

SEQ ID NO: 507 - protein, 80 aa, Homo sapiens
EIRFNGKGKKIRKPRTIYSSLQLQALNHRFQQTQYLALPERAELAASLGLTQTQVKIWFQNKRSKFKKLLKQGSNPHESD

SEQ ID NO: 508 - protein, 80 aa, Homo sapiens
GLHGTRQEEMIDHRLTDREWAEEWKHLDHLLNCIMDMVEKTRRSLTVLRRCQEADREELNYWIRRYSDAEDLKKGGGSSS

SEQ ID NO: 509 - protein, 80 aa, Homo sapiens
ELSAVGERVFAAEALLKRRIRKGRMEYLVKWKGWSQKYSTWEPEENILDARLLAAFEEREREMELYGPKKRGPKPKTFLL

SEQ ID NO: 510 - protein, 80 aa, Homo sapiens
AREKSAGKRGPDRGSPEYRQRRERNNIAVRKSRDKAKRRNQEMQQKLVELSAENEKLHQRVEQLTRDLAGLRQFFKQLPS

SEQ ID NO: 511 - protein, 80 aa, Homo sapiens
SGGCDNLIKLWKEEEDGQWKEEQKLEAHSDWVRDVAWAPSIGLPTSTIASCSQDGRVFIWTCDDASSNTWSPKLLHKFND

SEQ ID NO: 512 - protein, 80 aa, Homo sapiens
VKGVDLDAPGSINGVPLLEVDLDSFEDKPWRKPGADLSDYFNYGFNEDTWKAYCEKQKRIRMGLEVIPVTSTTNKITAED

SEQ ID NO: 513 - protein, 80 aa, Homo sapiens
KADSESNKGKKRRNRTTFTSYQLEELEKVFQKTHYPDVYAREQLAMRTDLTEARVQVWFQNRRAKWRKRERFGQMQQVRT

SEQ ID NO: 514 - protein, 80 aa, Homo sapiens
TAKQREAEATAKRPRTTITAKQLETLKSAYNTSPKPARHVREQLSSETGLDMRVVQVWFQNRRAKEKRLKKDAGRQRWGQ

SEQ ID NO: 515 - protein, 80 aa, Homo sapiens
GRHHAECLKPRCAACDEIIFADECTEAEGRHWHMKHFCCFECETVLGGQRYIMKEGRPYCCHCFESLYAEYCDTCAQHIG

SEQ ID NO: 516 - protein, 80 aa, Homo sapiens
IIGGDRPDEFLQVKNVLKDGPAAQDGKIAPGDVIVDINGNCVLGHTHADVVQMFQLVPVNQYVNLTLCRGYPLPDDSEDP

SEQ ID NO: 517 - protein, 80 aa, Homo sapiens
CCPECDTRVTSQCLDQNGHKLYRSGDNWTHSCQQCRCLEGEVDCWPLTCPNLSCEYTAILEGECCPRCVSDPCLADNITY

SEQ ID NO: 518 - protein, 80 aa, Homo sapiens
LNSEEKKKRKQRRNRTTFNSSQLQALERVFERTHYPDAFVREDLARRVNLTEARVQVWFQNRRAKFRRNERAMLANKNAS

SEQ ID NO: 519 - protein, 80 aa, Homo sapiens
GLNGGYQDELVDHRLTEREWADEWKHLDHALNCIMEMVEKTRRSMAVLRRCQESDREELNYWKRRYNENTELRKTGTELV

SEQ ID NO: 520 - protein, 80 aa, Homo sapiens
GPGEEAPKKKHRRNRTTFTTYQLHQLERAFEASHYPDVYSREELAAKVHLPEVRVQVWFQNRRAKWRRQERLESGSGAVA

SEQ ID NO: 521 - protein, 80 aa, Homo sapiens
VRMVNGKPKKVRKPRTIYSSYQLAALQRRFQKAQYLALPERAELAAQLGLTQTQVKIWFQNRRSKFKKLYKNGEVPLEHS

SEQ ID NO: 522 - protein, 80 aa, Homo sapiens
EVRFNGKGKKIRKPRTIYSSLQLQALNRRFQQTQYLALPERAELAASLGLTQTQVKIWFQNKRSKFKKLMKQGGAALEGS

SEQ ID NO: 523 - protein, 80 aa, Homo sapiens
GRSEQPKARQRRKPRVLFSQAQVLALERRFKQQRYLSAPEREHLASALQLTSTQVKIWFQNRRYKCKRQRQDKSLELAGH

SEQ ID NO: 524 - protein, 80 aa, Homo sapiens
LPRTLGELQLYRILQKANLLSYFDAFIQQGGDDVQQLCEAGEEEFLEIMALVGMASKPLHVRRLQKALRDWVTNPGLFNQ

SEQ ID NO: 525 - protein, 80 aa, Homo sapiens
NLSLDEDIQKWTVDDVHSFIRSLPGCSDYAQVFKDHAIDGETLPLLTEEHLRGTMGLKLGPALKIQSQVSQHVGSMFYKK

SEQ ID NO: 526 - protein, 80 aa, Homo sapiens
SPEDGSLKKKQRRQRTHFTSQQLQELEATFQRNRYPDMSTREEIAVWTNLTEARVRVWFKNRRAKWRKRERSQQAELCKG

SEQ ID NO: 527 - protein, 80 aa, Homo sapiens
SNLLVSASDDKTLKIWDVSSGKCLKTLKGHSNYVFCCNFNPQSNLIVSGSFDESVRIWDVKTGKCLKTLPAHSDPVSAVH

SEQ ID NO: 528 - protein, 80 aa, Homo sapiens
GNYKSEVNSKPRKERTAFTKEQIRELEAEFAHHNYLTRLRRYEIAVNLDLTERQVKVWFQNRRMKWKRVKGGQQGAAARE

SEQ ID NO: 529 - protein, 80 aa, Homo sapiens
LPRTLGELQLYRVLQRANLLSYYETFIQQGGDDVQQLCEAGEEEFLEIMALVGMATKPLHVRRLQKALREWATNPGLFSQ

SEQ ID NO: 530 - protein, 80 aa, Homo sapiens
PEEPTIGDIYNGKVTSIMQFGCFVQLEGLRKRWEGLVHISELRREGRVANVADVVSKGQRVKVKVLSFTGTKTSLSMKDV

SEQ ID NO: 531 - protein, 80 aa, Homo sapiens
YAFNHPFSINNLMSSEQQHHHSHHHHQPHKMDLKAYEQVMHYPGYGSPMPGSLAMGPVTNKTGLDASPLAADTSYYQGVY

SEQ ID NO: 532 - protein, 80 aa, Homo sapiens
TAAAGPAPPTAPEPAGASSEPEAGDWRPEMSPCSNVVVTDVTSNLLTVTIKEFCNPEDFEKVAAGVAGAAGGGGSIGASK

SEQ ID NO: 533 - protein, 80 aa, Homo sapiens
FLLHNALARKPKRIRTAFSPSQLLRLEHAFEKNHYVVGAERKQLAHSLSLTETQVKVWFQNRRTKFKRQKLEEEGSDSQQ

SEQ ID NO: 534 - protein, 80 aa, Homo sapiens
KRIALYIGNLTWWTTDEDLTEAVHSLGVNDILEIKFFENRANGQSKGFALVGVGSEASSKKLMDLLPKRELHGQNPVVTP

SEQ ID NO: 535 - protein, 80 aa, Homo sapiens
SGAPWYPINSRSRKKRKPYSKLQLAELEGEFLVNEFITRQRRRELSDRLNLSDQQVKIWFQNRRMKKKRLLLREQALSFF

SEQ ID NO: 536 - protein, 80 aa, Homo sapiens
SDNLYPESITSRDCVQLGPPSEGELVELRWTDGNLYKAKFISSVTSHIYQVEFEDGSQLTVKRGDIFTLEEELPKRVRSR

SEQ ID NO: 537 - protein, 80 aa, Homo sapiens
GIPASKVSKWSTDEVSEFIQSLPGCEEHGKVFKDEQIDGEAFLLMTQTDIVKIMSIKLGPALKIFNSILMFKAAEKNSHN

SEQ ID NO: 538 - protein, 80 aa, Homo sapiens
EPSGLHEKRKQRRIRTTFTSAQLKELERVFAETHYPDIYTREELALKIDLTEARVQVWFQNRRAKFRKQERAASAKGAAG

SEQ ID NO: 539 - protein, 80 aa, Homo sapiens
LLLHGPFARKPKRIRTAFSPSQLLRLERAFEKNHYVVGAERKQLAGSLSLSETQVKVWFQNRRTKYKRQKLEEEGPESEQ

SEQ ID NO: 540 - protein, 80 aa, Homo sapiens
SSGNDDDLTIPRAAINKMIKETLPNVRVANDARELVVNCCTEFIHLISSEANEICNKSEKKTISPEHVIQALESLGFGSY

SEQ ID NO: 541 - protein, 80 aa, Homo sapiens
ERRPQAPAKKLRKPRTIYSSLQLQHLNQRFQHTQYLALPERAQLAAQLGLTQTQVKIWFQNKRSKYKKLLKQNSGGQEGD

SEQ ID NO: 542 - protein, 80 aa, Homo sapiens
NVQDRVKRPMNAFIVWSRDQRRKMALENPRMRNSEISKQLGYQWKMLTEAEKWPFFQEAQKLQAMHREKYPNYKYRPRRK

SEQ ID NO: 543 - protein, 80 aa, Homo sapiens
EITRLAVWAAVQAVERKLEAQAMRLLTLEGRTGTNEKKIADCEKTAVEFANHLESKWVVLGTLLQEYGLLQRRLENMENL

SEQ ID NO: 544 - protein, 80 aa, Homo sapiens
CEKDIDECSEGIIECHNHSRCVNLPGWYHCECRSGFHDDGTYSLSGESCIDIDECALRTHTCWNDSACINLAGGFDCLCP

SEQ ID NO: 545 - protein, 80 aa, Homo sapiens
AAISLWTVVAAVQAIERKVEIHSRRLLHLEGRTGTAEKKLASCEKTVTELGNQLEGKWAVLGTLLQEYGLLQRRLENLEN

SEQ ID NO: 546 - protein, 80 aa, Homo sapiens
GQNRPLIKPKRRLSAARRAGTSCANCQTTTTTLWRRNANGDPVCNACGLYYKLHNINRPLTMKKEGIQTRNRKMSSKSKK

SEQ ID NO: 547 - protein, 80 aa, Homo sapiens
HAELPGKHCRRRKARTVFSDSQLSGLEKRFEIQRYLSTPERVELATALSLSETQVKTWFQNRRMKHKKQLRKSQDEPKAP

SEQ ID NO: 548 - protein, 80 aa, Homo sapiens
QDATVYVGGLDEKVSEPLLWELFLQAGPVVNTHMPKDRVTGQHQGYGFVEFLSEEDADYAIKIMNMIKLYGKPIRVNKAS

SEQ ID NO: 549 - protein, 80 aa, Homo sapiens
PIDNDAEGVWSPDIEQSFQEALAIYPPCGRRKIILSDEGKMYGRNELIARYIKLRTGKTRTRKQVSSHIQVLARRKSRDF

SEQ ID NO: 550 - protein, 80 aa, Homo sapiens
GLDNDAEGVWSPDIEQSFQEALAIYPPCGRRKIILSDEGKMYGRNELIARYIKLRTGKTRTRKQVSSHIQVLARKKVREY

SEQ ID NO: 551 - protein, 80 aa, Homo sapiens
DSVGTPQSNGGMRLHDFVSKTVIKPESCVPCGKRIKFGKLSLKCRDCRVVSHPECRDRCPLPCIPTLIGTPVKIGEGMLA

SEQ ID NO: 552 - protein, 80 aa, Homo sapiens
SAPHSMTASSSSVSSPSPGLPRRSAPPSPLCRSLSPGTGGGVRGGVGYLSRGDPVRVLARRVRPDGSVQYLVEWGGGGIF

SEQ ID NO: 553 - protein, 80 aa, Homo sapiens
GDPHYSFNHPFSINNLMSSSEQQHKLDFKAYEQALQYSPYGSTLPASLPLGSASVTTRSPIEPSALEPAYYQGVYSRPVL

SEQ ID NO: 554 - protein, 80 aa, Homo sapiens
GQNRPLIKPKRRLSAARRAGTCCANCQTTTTTLWRRNANGDPVCNACGLYYKLHNVNRPLTMKKEGIQTRNRKMSNKSKK

SEQ ID NO: 555 - protein, 80 aa, Homo sapiens
DSLSGSSLYSTSANLPVMGHEKFPSDLDLDMFNGSLECDMESIIRSELMDADGLDFNFDSLISTQNVVGLNVGNFTGAKQ

SEQ ID NO: 556 - protein, 80 aa, Homo sapiens
TEISLWTVVAAIQAVEKKMESQAARLQSLEGRTGTAEKKLADCEKMAVEFGNQLEGKWAVLGTLLQEYGLLQRRLENVEN

SEQ ID NO: 557 - protein, 80 aa, Homo sapiens
MDSGTRRKNATRETTSTLKAWLQEHRKNPYPTKGEKIMLAIITKMTLTQVSTWFANARRRLKKENKMTWPPRNKCADEKR

SEQ ID NO: 558 - protein, 80 aa, Homo sapiens
NIEKQIYLPSTRAKTSIVWHFFHVDPQYTWRAICNLCEKSVSRGKPGSHLGTSTLQRHLQARHSPHWTRANKFGVASGEE

SEQ ID NO: 559 - protein, 80 aa, Homo sapiens
AKQNDDSEAGAKRPRTTITAKQLETLKNAYKNSPKPARHVREQLSSETGLDMRVVQVWFQNRRAKEKRLKKDAGRHRWGQ

SEQ ID NO: 560 - protein, 80 aa, Homo sapiens
DALSYLDQVKLQFGSQPQVYNDFLDIMKEFKSQSIDTPGVISRVSQLFKGHPDLIMGFNTFLPPGYKIEVQTNDMVNVTT

SEQ ID NO: 561 - protein, 80 aa, Homo sapiens
DDHTVCLWDINAGPKEGKIVDAKAIFTGHSAVVEDVAWHLLHESLFGSVADDQKLMIWDTRSNTTSKPSHLVDAHTAEVN

SEQ ID NO: 562 - protein, 80 aa, Homo sapiens
GSILLDKDGKRKHTRPTFSGQQIFALEKTFEQTKYLAGPERARLAYSLGMTESQVKVWFQNRRTKWRKKHAAEMATAKKK

SEQ ID NO: 563 - protein, 80 aa, Homo sapiens
DPTALVEAIVEEVACPICMTFLREPMSIDCGHSFCHSCLSGLWEIPGESQNWGYTCPLCRAPVQPRNLRPNWQLANVVEK

SEQ ID NO: 564 - protein, 80 aa, Homo sapiens
QSLPKKVSLSSDTTRKPLEIRSPSAESKKPKWVPPAASGGSRSSSSPLVVVSVKSPNQSLRLGLSRLARVKPLHPNATST

SEQ ID NO: 565 - protein, 80 aa, Homo sapiens
AKSSQRKQRDCVNQCKSKPGLSTSIPLRMSSYTFKRPVTRITPHPGNEVRYHQWEESLEKPQQVCWQRRLQGLQAYSSAG

SEQ ID NO: 566 - protein, 80 aa, Homo sapiens
VRMVNGKPKKVRKPRTIYSSFQLAALQRRFQKTQYLALPERAELAASLGLTQTQVKIWFQNKRSKIKKIMKNGEMPPEHS

SEQ ID NO: 567 - protein, 80 aa, Homo sapiens
LQCNNHACGWDGGDCSLNFNDPWKNCTQSLQCWKYFSDGHCDSQCNSAGCLFDGFDCQRAEGQCNPLYDQYCKDHFSDGH

SEQ ID NO: 568 - protein, 80 aa, Homo sapiens
ETWVEEDELFQVQAAPDEDSTTNITKKQKWTVEESEWVKAGVQKYGEGNWAAISKNYPFVNRTAVMIKDRWRTMKRLGMN

SEQ ID NO: 569 - protein, 80 aa, Homo sapiens
AEISLWTVVAAIQAVERKVDAQASQLLNLEGRTGTAEKKLADCEKTAVEFGNHMESKWAVLGTLLQEYGLLQRRLENLEN

SEQ ID NO: 570 - protein, 80 aa, Homo sapiens
LEKRTLFRLDLVPINRSVGLKAKPTKPVTEVLRPVVARYGLDLSGLLVRLSGEKEPLDLGAPISSLDGQRVVLEEKDPSR

SEQ ID NO: 571 - protein, 80 aa, Homo sapiens
PNCLSSSMQLPHGGGRHQELVRFRDVAVVFSPEEWDHLTPEQRNLYKDVMLDNCKYLASLGNWTYKAHVMSSLKQGKEPW

SEQ ID NO: 572 - protein, 80 aa, Homo sapiens
DDYKEGDLRIMPESSESPPTEREPGGVVDGLIGKHVEYTKEDGSKRIGMVIHQVEAKPSVYFIKFDDDFHIYVYDLVKKS

SEQ ID NO: 573 - protein, 80 aa, Homo sapiens
SEPDLPLKRKQRRSRTTFTAEQLEELEKAFERTHYPDIYTREELAQRTKLTEARVQVWFSNRRARWRKQAGANQLAAFNH

SEQ ID NO: 574 - protein, 80 aa, Homo sapiens
AGGVLDKDGKKKHSRPTFSGQQIFALEKTFEQTKYLAGPERARLAYSLGMTESQVKVWFQNRRTKWRKRHAVEMASAKKK

SEQ ID NO: 575 - protein, 80 aa, Homo sapiens
DVMSFSVTVTTIPASQAMNPSSHGQTIPVQAFSEENSIEGTPSKCYCRLKAMIMCKGCGAFCHDDCIGPSKLCVSCLVVR

SEQ ID NO: 576 - protein, 80 aa, Homo sapiens
GGYSSVSSCNGYGRMGLLHQEKLPSDLDGMFIERLDCDMESIIRNDLMDGDTLDFNFDNVLPNQSFPHSVKTTTHSWVSG

SEQ ID NO: 577 - protein, 80 aa, Homo sapiens
GGSPTGFGCKSRPKARSSTGRECVNCGATSTPLWRRDGTGHYLCNACGLYHKMNGQNRPLIKPKRRLSAARRAGTSCANC

SEQ ID NO: 578 - protein, 80 aa, Homo sapiens
GQNRPLIRPKKRLIVSKRAGTQCTNCQTTTTTLWRRNASGDPVCNACGLYYKLHQVNRPLTMRKDGIQTRNRKASGKGKK

SEQ ID NO: 579 - protein, 80 aa, Homo sapiens
PVALLRKQNFQPTAQQQLTKPAKITCANCKKPLQKGQTAYQRKGSAHLFCSTTCLSSFSHKRTQNTRSIICKKDASTKKA

SEQ ID NO: 580 - protein, 80 aa, Homo sapiens
TEITLWTVVAAIQALEKKVDSCLTRLLTLEGRTGTAEKKLADCEKTAVEFGNQLEGKWAVLGTLLQEYGLLQRRLENVEN

SEQ ID NO: 581 - protein, 80 aa, Homo sapiens
KKQRGRPSSQPRRNIVGCRISHGWKEGDEPITQWKGTVLDQVPINPSLYLVKYDGIDCVYGLELHRDERVLSLKILSDRV

SEQ ID NO: 582 - protein, 80 aa, Homo sapiens
WTCDLDDDCGDRSDESASCAYPTCFPLTQFTCNNGRCININWRCDNDNDCGDNSDEAGCSHSCSSTQFKCNSGRCIPEHW

SEQ ID NO: 583 - protein, 80 aa, Homo sapiens
PKGAAAPSASQRRKRTSFSAEQLQLLELVFRRTRYPDIHLRERLAALTLLPESRIQVWFQNRRAKSRRQSGKSFQPLARP

SEQ ID NO: 584 - protein, 80 aa, Homo sapiens
KIKYDWYQTESQVVITLMIKNVQKNDVNVEFSEKELSALVKLPSGEDYNLKLELLHPIIPEQSTFKVLSTKIEIKLKKPE

SEQ ID NO: 585 - protein, 80 aa, Homo sapiens
DPSKEVEYVCELCKGAAPPDSPVVYSDRAGYNKQWHPTCFVCAKCSEPLVDLIYFWKDGAPWCGRHYCESLRPRCSGCDE

SEQ ID NO: 586 - protein, 80 aa, Homo sapiens
GSGAGKAKKSVDKNSNEYRVRRERNNIAVRKSRDKAKQRNVETQQKVLELTSDNDRLRKRVEQLSRELDTLRGIFRQLPE

SEQ ID NO: 587 - protein, 80 aa, Homo sapiens
GPASSFTPKQRSKARSCSEGRECVNCGATATPLWRRDGTGHYLCNACGLYHKMNGQNRPLIKPKRRLSAARRAGTCCANC

SEQ ID NO: 588 - protein, 80 aa, Homo sapiens
KPSDHIKRPMNAFMVWSRGQRRKMAQENPKMHNSEISKRLGAEWKLLSEAEKRPYIDEAKRLRAQHMKEHPDYKYRPRRK

SEQ ID NO: 589 - protein, 80 aa, Homo sapiens
LYSGFQQTADKCSVCGHLIMEMILQALGKSYHPGCFRCSVCNECLDGVPFTVDVENNIYCVRDYHTVFAPKCASCARPIL

SEQ ID NO: 590 - protein, 80 aa, Homo sapiens
HPSQDLVFSASPDATIRIWSVPNASCVQVVRAHESAVTGLSLHATGDYLLSSSDDQYWAFSDIQTGRVLTKVTDETSGCS

SEQ ID NO: 591 - protein, 80 aa, Homo sapiens
ELSAVGERVFAAESIIKRRIRKGRIEYLVKWKGWAIKYSTWEPEENILDSRLIAAFEQKERERELYGPKKRGPKPKTFLL

SEQ ID NO: 592 - protein, 80 aa, Homo sapiens
RTGSDSKSGKPRRARTAFTYEQLVALENKFKATRYLSVCERLNLALSLSLTETQVKIWFQNRRTKWKKQNPGADTSAPTG

SEQ ID NO: 593 - protein, 80 aa, Homo sapiens
VWDLSKIGEEQSPEDAEDGPPELLFIHGGHTAKISDFSWNPNEPWVICSVSEDNIMQVWQMAENIYNDEDPEGSVDPEGQ

SEQ ID NO: 594 - protein, 80 aa, Homo sapiens
ERCTPAGGGAEPRKLSRTPKCARCRNHGVVSCLKGHKRFCRWRDCQCANCLLVVERQRVMAAQVALRRQQATEDKKGLSG

SEQ ID NO: 595 - protein, 80 aa, Homo sapiens
SQPGALIPGDPQAMSQPNRGPSPFSPVQLHQLRAQILAYKMLARGQPLPETLQLAVQGKRTLPGLQQQQQQQQQQQQQQQ

SEQ ID NO: 596 - protein, 573 aa, Homo sapiens; identical to SEQ ID NO: 123

SEQ ID NO: 597 - protein, 835 aa, unidentified
  REGION 1..835: note = Description of Unknwon: KAP1 sequence
MAASAAAASAAAASAASGSPGPGEGSAGGEKRSTAPSAAASASASAAASSPAGGGAEALELLEHCGVCRERLRPEREPRLLPCLHSACSACLGPAAPAAANSSGDGGAAGDGTVVDCPVCKQQCFSKDIVENYFMRDSGSKAATDAQDANQCCTSCEDNAPATSYCVECSEPLCETCVEAHQRVKYTKDHTVRSTGPAKSRDGERTVYCNVHKHEPLVLFCESCDTLTCRDCQLNAHKDHQYQFLEDAVRNQRKLLASLVKRLGDKHATLQKSTKEVRSSIRQVSDVQKRVQVDVKMAILQIMKELNKRGRVLVNDAQKVTEGQQERLERQHWTMTKIQKHQEHILRFASWALESDNNTALLLSKKLIYFQLHRALKMIVDPVEPHGEMKFQWDLNAWTKSAEAFGKIVAERPGTNSTGPAPMAPPRAPGPLSKQGSGSSQPMEVQEGYGFGSGDDPYSSAEPHVSGVKRSRSGEGEVSGLMRKVPRVSLERLDLDLTADSQPPVFKVFPGSTTEDYNLIVIERGAAAAATGQPGTAPAGTPGAPPLAGMAIVKEEETEAAIGAPPTATEGPETKPVLMALAEGPGAEGPRLASPSGSTSSGLEVVAPEGTSAPGGGPGTLDDSATICRVCQKPGDLVMCNQCEFCFHLDCHLPALQDVPGEEWSCSLCHVLPDLKEEDGSLSLDGADSTGVVAKLSPANQRKCERVLLALFCHEPCRPLHQLATDSTFSLDQPGGTLDLTLIRARLQEKLSPPYSSPQEFAQDVGRMFKQFNKLTEDKADVQSIIGLQRFFETRMNEAFGDTKFSAVLVEPPPMSLPGAGLSSQELSGGPGDGP

SEQ ID NO: 598 - protein, 486 aa, unidentified
  REGION 1..486: note = Description of Unknwon: MECP2 sequence
MVAGMLGLREEKSEDQDLQGLKDKPLKFKKVKKDKKEEKEGKHEPVQPSAHHSAEPAEAGKAETSEGSGSAPAVPEASASPKQRRSIIRDRGPMYDDPTLPEGWTRKLKQRKSGRSAGKYDVYLINPQGKAFRSKVELIAYFEKVGDTSLDPNDFDFTVTGRGSPSRREQKPPKKPKSPKAPGTGRGRGRPKGSGTTRPKAATSEGVQVKRVLEKSPGKLLVKMPFQTSPGGKAEGGGATTSTQVMVIKRPGRKRKAEADPQAIPKKRGRKPGSVVAAAAAEAKKKAVKESSIRSVQETVLPIKKRKTRETVSIEVKEVVKPLLVSTLGEKSGKGLKTCKSPGRKSKESSPKGRSSSASSPPKKEHHHHHHHSESPKAPVPLLPPLPPPPPEPESSEDPTSPPEPQDLSSSVCKEEKMPRGGSLESDGCPKEPAKTQPAVATAATAAEKYKHRGEGERKDIVSSSMPRPNREEPVDSRTPVTERVS

SEQ ID NO: 599 - protein, 2136 aa, Homo sapiens
MSRSRHARPSRLVRKEDVNKKKKNSQLRKTTKGANKNVASVKTLSPGKLKQLIQERDVKKKTEPKPPVPVRSLLTRAGAARMNLDRTEVLFQNPESLTCNGFTMALRSTSLSRRLSQPPLVVAKSKKVPLSKGLEKQHDCDYKILPALGVKHSENDSVPMQDTQVLPDIETLIGVQNPSLLKGKSQETTQFWSQRVEDSKINIPTHSGPAAEILPGPLEGTRCGEGLFSEETLNDTSGSPKMFAQDTVCAPFPQRATPKVTSQGNPSIQLEELGSRVESLKLSDSYLDPIKSEHDCYPTSSLNKVIPDLNLRNCLALGGSTSPTSVIKFLLAGSKQATLGAKPDHQEAFEATANQQEVSDTTSFLGQAFGAIPHQWELPGADPVHGEALGETPDLPEIPGAIPVQGEVFGTILDQQETLGMSGSVVPDLPVFLPVPPNPIATFNAPSKWPEPQSTVSYGLAVQGAIQILPLGSGHTPQSSSNSEKNSLPPVMAISNVENEKQVHISFLPANTQGFPLAPERGLFHASLGIAQLSQAGPSKSDRGSSQVSVTSTVHVVNTTVVTMPVPMVSTSSSSYTTLLPTLEKKKRKRCGVCEPCQQKTNCGECTYCKNRKNSHQICKKRKCEELKKKPSVVVPLEVIKENKRPQREKKPKVLKADFDNKPVNGPKSESMDYSRCGHGEEQKLELNPHTVENVTKNEDSMTGIEVEKWTQNKKSQLTDHVKGDFSANVPEAEKSKNSEVDKKRTKSPKLFVQTVRNGIKHVHCLPAETNVSFKKFNIEEFGKTLENNSYKFLKDTANHKNAMSSVATDMSCDHLKGRSNVLVFQQPGFNCSSIPHSSHSIINHHASIHNEGDQPKTPENIPSKEPKDGSPVQPSLLSLMKDRRLTLEQVVAIEALTQLSEAPSENSSPSKSEKDEESEQRTASLLNSCKAILYTVRKDLQDPNLQGEPPKLNHCPSLEKQSSCNTVVFNGQTTTLSNSHINSATNQASTKSHEYSKVTNSLSLFIPKSNSSKIDTNKSIAQGIITLDNCSNDLHQLPPRNNEVEYCNQLLDSSKKLDSDDLSCQDATHTQIEEDVATQLTQLASIIKINYIKPEDKKVESTPTSLVTCNVQQKYNQEKGTIQQKPPSSVHNNHGSSLTKQKNPTQKKTKSTPSRDRRKKKPTVVSYQENDRQKWEKLSYMYGTICDIWIASKFQNFGQFCPHDFPTVFGKISSSTKIWKPLAQTRSIMQPKTVFPPLTQIKLQRYPESAEEKVKVEPLDSLSLFHLKTESNGKAFTDKAYNSQVQLTVNANQKAHPLTQPSSPPNQCANVMAGDDQIRFQQVVKEQLMHQRLPTLPGISHETPLPESALTLRNVNVVCSGGITVVSTKSEEEVCSSSFGTSEFSTVDSAQKNFNDYAMNFFTNPTKNLVSITKDSELPTCSCLDRVIQKDKGPYYTHLGAGPSVAAVREIMENRYGQKGNAIRIEIVVYTGKEGKSSHGCPIAKWVLRRSSDEEKVLCLVRQRTGHHCPTAVMVVLIMVWDGIPLPMADRLYTELTENLKSYNGHPTDRRCTLNENRTCTCQGIDPETCGASFSFGCSWSMYFNGCKFGRSPSPRRFRIDPSSPLHEKNLEDNLQSLATRLAPIYKQYAPVAYQNQVEYENVARECRLGSKEGRPFSGVTACLDFCAHPHRDIHNMNNGSTVVCTLTREDNRSLGVIPQDEQLHVLPLYKLSDTDEFGSKEGMEAKIKSGAIEVLAPRRKKRTCFTQPVPRSGKKRAAMMTEVLAHKIRAVEKKPIPRIKRKNNSTTTNNSKPSSLPTLGSNTETVQPEVKSETEPHFILKSSDNTKTYSLMPSAPHPVKEASPGFSWSPKTASATPAPLKNDATASCGFSERSSTPHCTMPSGRLSGANAAAADGPGISQLGEVAPLPTLSAPVMEPLINSEPSTGVTEPLTPHQPNHQPSFLTSPQDLASSPMEEDEQHSEADEPPSDEPLSDDPLSPAEEKLPHIDEYWSDSEHIFLDANIGGVAIAPAHGSVLIECARRELHATTPVEHPNRNHPTRLSLVFYQHKNLNKPQHGFELNKIKFEAKEAKNKKMKASEQKDQAANEGPEQSSEVNELNQIPSHKALTLTHDNVVTVSPYALTHVAGPYNHWV

SEQ ID NO: 600 - protein, 2002 aa, Homo sapiens
MEQDRTNHVEGNRLSPFLIPSPPICQTEPLATKLQNGSPLPERAHPEVNGDTKWHSFKSYYGIPCMKGSQNSRVSPDFTQESRGYSKCLQNGGIKRTVSEPSLSGLLQIKKLKQDQKANGERRNFGVSQERNPGESSQPNVSDLSDKKESVSSVAQENAVKDFTSFSTHNCSGPENPELQILNEQEGKSANYHDKNIVLLKNKAVLMPNGATVSASSVEHTHGELLEKTLSQYYPDCVSIAVQKTTSHINAINSQATNELSCEITHPSHTSGQINSAQTSNSELPPKPAAVVSEACDADDADNASKLAAMLNTCSFQKPEQLQQQKSVFEICPSPAENNIQGTTKLASGEEFCSGSSSNLQAPGGSSERYLKQNEMNGAYFKQSSVFTKDSFSATTTPPPPSQLLLSPPPPLPQVPQLPSEGKSTLNGGVLEEHHHYPNQSNTTLLREVKIEGKPEAPPSQSPNPSTHVCSPSPMLSERPQNNCVNRNDIQTAGTMTVPLCSEKTRPMSEHLKHNPPIFGSSGELQDNCQQLMRNKEQEILKGRDKEQTRDLVPPTQHYLKPGWIELKAPRFHQAESHLKRNEASLPSILQYQPNLSNQMTSKQYTGNSNMPGGLPRQAYTQKTTQLEHKSQMYQVEMNQGQSQGTVDQHLQFQKPSHQVHFSKTDHLPKAHVQSLCGTRFHFQQRADSQTEKLMSPVLKQHLNQQASETEPFSNSHLLQHKPHKQAAQTQPSQSSHLPQNQQQQQKLQIKNKEEILQTFPHPQSNNDQQREGSFFGQTKVEECFHGENQYSKSSEFETHNVQMGLEEVQNINRRNSPYSQTMKSSACKIQVSCSNNTHLVSENKEQTTHPELFAGNKTQNLHHMQYFPNNVIPKQDLLHRCFQEQEQKSQQASVLQGYKNRNQDMSGQQAAQLAQQRYLIHNHANVFPVPDQGGSHTQTPPQKDTQKHAALRWHLLQKQEQQQTQQPQTESCHSQMHRPIKVEPGCKPHACMHTAPPENKTWKKVTKQENPPASCDNVQQKSIIETMEQHLKQFHAKSLFDHKALTLKSQKQVKVEMSGPVTVLTRQTTAAELDSHTPALEQQTTSSEKTPTKRTAASVLNNFIESPSKLLDTPIKNLLDTPVKTQYDFPSCRCVEQIIEKDEGPFYTHLGAGPNVAAIREIMEERFGQKGKAIRIERVIYTGKEGKSSQGCPIAKWVVRRSSSEEKLLCLVRERAGHTCEAAVIVILILVWEGIPLSLADKLYSELTETLRKYGTLTNRRCALNEERTCACQGLDPETCGASFSFGCSWSMYYNGCKFARSKIPRKFKLLGDDPKEEEKLESHLQNLSTLMAPTYKKLAPDAYNNQIEYEHRAPECRLGLKEGRPFSGVTACLDFCAHAHRDLHNMQNGSTLVCTLTREDNREFGGKPEDEQLHVLPLYKVSDVDEFGSVEAQEEKKRSGAIQVLSSFRRKVRMLAEPVKTCRQRKLEAKKAAAEKLSSLENSSNKNEKEKSAPSRTKQTENASQAKQLAELLRLSGPVMQQSQQPQPLQKQPPQPQQQQRPQQQQPHHPQTESVNSYSASGSTNPYMRRPNPVSPYPNSSHTSDIYGSTSPMNFYSTSSQAAGSYLNSSNPMNPYPGLLNQNTQYPSYQCNGNLSVDNCSPYLGSYSPQSQPMDLYRYPSQDPLSKLSLPPIHTLYQPRFGNSQSFTSKYLGYGNQNMQGDGFSSCTIRPNVHHVGKLPPYPTHEMDGHFMGATSRLPPNLSNPNMDYKNGEHHSPSHIIHNYSAAPGMFNSSLHALHLQNKENDMLSHTANGLSKMLPALNHDRTACVQGGLHKLSDANGQEKQPLALVQGVASGAEDNDEVWSDSEQSFLDPDIGGVAVAPTHGSILIECAKRELHATTPLKNPNRNHPTRISLVFYQHKSMNEPKHGLALWEAKMAEKAREKEEECEKYGPDYVPQKSHGKKVKREPAEPHETSEPTYLRFIKSLAERTMSVTTDSTVTTSPYAFTRVTGPYNRYI

SEQ ID NO: 601 - protein, 1795 aa, Homo sapiens
MSQFQVPLAVQPDLPGLYDFPQRQVMVGSFPGSGLSMAGSESQLRGGGDGRKKRKRCGTCEPCRRLENCGACTSCTNRRTHQICKLRKCEVLKKKVGLLKEVEIKAGEGAGPWGQGAAVKTGSELSPVDGPVPGQMDSGPVYHGDSRQLSASGVPVNGAREPAGPSLLGTGGPWRVDQKPDWEAAPGPAHTARLEDAHDLVAFSAVAEAVSSYGALSTRLYETFNREMSREAGNNSRGPRPGPEGCSAGSEDLDTLQTALALARHGMKPPNCNCDGPECPDYLEWLEGKIKSVVMEGGEERPRLPGPLPPGEAGLPAPSTRPLLSSEVPQISPQEGLPLSQSALSIAKEKNISLQTAIAIEALTQLSSALPQPSHSTPQASCPLPEALSPPAPFRSPQSYLRAPSWPVVPPEEHSSFAPDSSAFPPATPRTEFPEAWGTDTPPATPRSSWPMPRPSPDPMAELEQLLGSASDYIQSVFKRPEALPTKPKVKVEAPSSSPAPAPSPVLQREAPTPSSEPDTHQKAQTALQQHLHHKRSLFLEQVHDTSFPAPSEPSAPGWWPPPSSPVPRLPDRPPKEKKKKLPTPAGGPVGTEKAAPGIKPSVRKPIQIKKSRPREAQPLFPPVRQIVLEGLRSPASQEVQAHPPAPLPASQGSAVPLPPEPSLALFAPSPSRDSLLPPTQEMRSPSPMTALQPGSTGPLPPADDKLEELIRQFEAEFGDSFGLPGPPSVPIQDPENQQTCLPAPESPFATRSPKQIKIESSGAVTVLSTTCFHSEEGGQEATPTKAENPLTPTLSGFLESPLKYLDTPTKSLLDTPAKRAQAEFPTCDCVEQIVEKDEGPYYTHLGSGPTVASIRELMEERYGEKGKAIRIEKVIYTGKEGKSSRGCPIAKWVIRRHTLEEKLLCLVRHRAGHHCQNAVIVILILAWEGIPRSLGDTLYQELTDTLRKYGNPTSRRCGLNDDRTCACQGKDPNTCGASFSFGCSWSMYFNGCKYARSKTPRKFRLAGDNPKEEEVLRKSFQDLATEVAPLYKRLAPQAYQNQVTNEEIAIDCRLGLKEGRPFAGVTACMDFCAHAHKDQHNLYNGCTVVCTLTKEDNRCVGKIPEDEQLHVLPLYKMANTDEFGSEENQNAKVGSGAIQVLTAFPREVRRLPEPAKSCRQRQLEARKAAAEKKKIQKEKLSTPEKIKQEALELAGITSDPGLSLKGGLSQQGLKPSLKVEPQNHFSSFKYSGNAVVESYSVLGNCRPSDPYSMNSVYSYHSYYAQPSLTSVNGFHSKYALPSFSYYGFPSSNPVFPSQFLGPGAWGHSGSSGSFEKKPDLHALHNSLSPAYGGAEFAELPSQAVPTDAHHPTPHHQQPAYPGPKEYLLPKAPLLHSVSRDPSPFAQSSNCYNRSIKQEPVDPLTQAEPVPRDAGKMGKTPLSEVSQNGGPSHLWGQYSGGPSMSPKRTNGVGGSWGVFSSGESPAIVPDKLSSFGASCLAPSHFTDGQWGLFPGEGQQAASHSGGRLRGKPWSPCKFGNSTSALAGPSLTEKPWALGAGDFNSALKGSPGFQDKLWNPMKGEEGRIPAAGASQLDRAWQSFGLPLGSSEKLFGALKSEEKLWDPFSLEEGPAEEPPSKGAVKEEKGGGGAEEEEEELWSDSEHNFLDENIGGVAVAPAHGSILIECARRELHATTPLKKPNRCHPTRISLVFYQHKNLNQPNHGLALWEAKMKQLAERARARQEEAARLGLGQQEAKLYGKKRKWGGTVVAEPQQKEKKGVVPTRQALAVPTDSAVTVSSYAYTKVTGPYSRWI

SEQ ID NO: 602 - protein, 410 aa, Homo sapiens
MEAENAGSYSLQQAQAFYTFPFQQLMAEAPNMAVVNEQQMPEEVPAPAPAQEPVQEAPKGRKRKPRTTEPKQPVEPKKPVESKKSGKSAKSKEKQEKITDTFKVKRKVDRFNGVSEAELLTKTLPDILTFNLDIVIIGINPGLMAAYKGHHYPGPGNHFWKCLFMSGLSEVQLNHMDDHTLPGKYGIGFTNMVERTTPGSKDLSSKEFREGGRILVQKLQKYQPRIAVFNGKCIYEIFSKEVFGVKVKNLEFGLQPHKIPDTETLCYVMPSSSARCAQFPRAQDKVHYYIKLKDLRDQLKGIERNMDVQEVQYTFDLQLAQEDAKKMAVKEEKYDPGYEAAYGGAYGENPCSSEPCGFSSNGLIESVELRGESAFSGIPNGQWMTQSFTDQIPSFSNHCGTQEQEEESHA

SEQ ID NO: 603 - protein, 1393 aa, Arabidopsis sp.
MEKQRREESSFQQPPWIPQTPMKPFSPICPYTVEDQYHSSQLEERRFVGNKDMSGLDHLSFGDLLALANTASLIFSGQTPIPTRNTEVMQKGTEEVESLSSVSNNVAEQILKTPEKPKRKKHRPKVRREAKPKREPKPRAPRKSVVTDGQESKTPKRKYVRKKVEVSKDQDATPVESSAAVETSTRPKRLCRRVLDFEAENGENQTNGDIREAGEMESALQEKQLDSGNQELKDCLLSAPSTPKRKRSQGKRKGVQPKKNGSNLEEVDISMAQAAKRRQGPTCCDMNLSGIQYDEQCDYQKMHWLYSPNLQQGGMRYDAICSKVFSGQQHNYVSAFHATCYSSTSQLSANRVLTVEERREGIFQGRQESELNVLSDKIDTPIKKKTTGHARFRNLSSMNKLVEVPEHLTSGYCSKPQQNNKILVDTRVTVSKKKPTKSEKSQTKQKNLLPNLCRFPPSFTGLSPDELWKRRNSIETISELLRLLDINREHSETALVPYTMNSQIVLFGGGAGAIVPVTPVKKPRPRPKVDLDDETDRVWKLLLENINSEGVDGSDEQKAKWWEEERNVFRGRADSFIARMHLVQGDRRFTPWKGSVVDSVVGVFLTQNVSDHLSSSAFMSLASQFPVPFVPSSNFDAGTSSMPSIQITYLDSEETMSSPPDHNHSSVTLKNTQPDEEKDYVPSNETSRSSSEIAISAHESVDKTTDSKEYVDSDRKGSSVEVDKTDEKCRVLNLFPSEDSALTCQHSMVSDAPQNTERAGSSSEIDLEGEYRTSFMKLLQGVQVSLEDSNQVSPNMSPGDCSSEIKGFQSMKEPTKSSVDSSEPGCCSQQDGDVLSCQKPTLKEKGKKVLKEEKKAFDWDCLRREAQARAGIREKTRSTMDTVDWKAIRAADVKEVAETIKSRGMNHKLAERIQGFLDRLVNDHGSIDLEWLRDVPPDKAKEYLLSFNGLGLKSVECVRLLTLHHLAFPVDTNVGRIAVRLGWVPLQPLPESLQLHLLEMYPMLESIQKYLWPRLCKLDQKTLYELHYQMITFGKVFCTKSKPNCNACPMKGECRHFASAFASARLALPSTEKGMGTPDKNPLPLHLPEPFQREQGSEVVQHSEPAKKVTCCEPIIEEPASPEPETAEVSIADIEEAFFEDPEEIPTIRLNMDAFTSNLKKIMEHNKELQDGNMSSALVALTAETASLPMPKLKNISQLRTEHRVYELPDEHPLLAQLEKREPDDPCSYLLAIWTPGETADSIQPSVSTCIFQANGMLCDEETCFSCNSIKETRSQIVRGTILIPCRTAMRGSFPLNGTYFQVNEVFADHASSLNPINVPRELIWELPRRTVYFGTSVPTIFKGLSTEKIQACFWKGYVCVRGFDRKTRGPKPLIARLHFPASKLKGQQANLA

SEQ ID NO: 604 - protein, 1987 aa, Arabidopsis sp.
MNSRADPGDRYFRVPLENQTQQEFMGSWIPFTPKKPRSSLMVDERVINQDLNGFPGGEFVDRGFCNTGVDHNGVFDHGAHQGVTNLSMMINSLAGSHAQAWSNSERDLLGRSEVTSPLAPVIRNTTGNVEPVNGNFTSDVGMVNGPFTQSGTSQAGYNEFELDDLLNPDQMPFSFTSLLSGGDSLFKVRQYGPPACNKPLYNLNSPIRREAVGSVCESSFQYVPSTPSLFRTGEKTGFLEQIVTTTGHEIPEPKSDKSMQSIMDSSAVNATEATEQNDGSRQDVLEFDLNKTPQQKPSKRKRKFMPKVVVEGKPKRKPRKPAELPKVVVEGKPKRKPRKAATQEKVKSKETGSAKKKNLKESATKKPANVGDMSNKSPEVTLKSCRKALNFDLENPGDARQGDSESEIVQNSSGANSFSEIRDAIGGTNGSFLDSVSQIDKTNGLGAMNQPLEVSMGNQPDKLSTGAKLARDQQPDLLTRNQQCQFPVATQNTQFPMENQQAWLQMKNQLIGFPFGNQQPRMTIRNQQPCLAMGNQQPMYLIGTPRPALVSGNQQLGGPQGNKRPIFLNHQTCLPAGNQLYGSPTDMHQLVMSTGGQQHGLLIKNQQPGSLIRGQQPCVPLIDQQPATPKGFTHLNQMVATSMSSPGLRPHSQSQVPTTYLHVESVSRILNGTTGTCQRSRAPAYDSLQQDIHQGNKYILSHEISNGNGCKKALPQNSSLPTPIMAKLEEARGSKRQYHRAMGQTEKHDLNLAQQIAQSQDVERHNSSTCVEYLDAAKKTKIQKVVQENLHGMPPEVIEIEDDPTDGARKGKNTASISKGASKGNSSPVKKTAEKEKCIVPKTPAKKGRAGRKKSVPPPAHASEIQLWQPTPPKTPLSRSKPKGKGRKSIQDSGKARGPSGELLCQDSIAEIIYRMQNLYLGDKEREQEQNAMVLYKGDGALVPYESKKRKPRPKVDIDDETTRIWNLLMGKGDEKEGDEEKDKKKEKWWEEERRVFRGRADSFIARMHLVQGDRRFSPWKGSVVDSVIGVFLTQNVSDHLSSSAFMSLAARFPPKLSSSREDERNVRSVVVEDPEGCILNLNEIPSWQEKVQHPSDMEVSGVDSGSKEQLRDCSNSGIERFNFLEKSIQNLEEEVLSSQDSFDPAIFQSCGRVGSCSCSKSDAEFPTTRCETKTVSGTSQSVQTGSPNLSDEICLQGNERPHLYEGSGDVQKQETTNVAQKKPDLEKTMNWKDSVCFGQPRNDTNWQTTPSSSYEQCATRQPHVLDIEDFGMQGEGLGYSWMSISPRVDRVKNKNVPRRFFRQGGSVPREFTGQIIPSTPHELPGMGLSGSSSAVQEHQDDTQHNQQDEMNKASHLQKTFLDLLNSSEECLTRQSSTKQNITDGCLPRDRTAEDVVDPLSNNSSLQNILVESNSSNKEQTAVEYKETNATILREMKGTLADGKKPTSQWDSLRKDVEGNEGRQERNKNNMDSIDYEAIRRASISEISEAIKERGMNNMLAVRIKDFLERIVKDHGGIDLEWLRESPPDKAKDYLLSIRGLGLKSVECVRLLTLHNLAFPVDTNVGRIAVRMGWVPLQPLPESLQLHLLELYPVLESIQKFLWPRLCKLDQRTLYELHYQLITFGKVFCTKSRPNCNACPMRGECRHFASAYASARLALPAPEERSLTSATIPVPPESYPPVAIPMIELPLPLEKSLASGAPSNRENCEPIIEEPASPGQECTEITESDIEDAYYNEDPDEIPTIKLNIEQFGMTLREHMERNMELQEGDMSKALVALHPTTTSIPTPKLKNISRLRTEHQVYELPDSHRLLDGMDKREPDDPSPYLLAIWTPGETANSAQPPEQKCGGKASGKMCFDETCSECNSLREANSQTVRGTLLIPCRTAMRGSFPLNGTYFQVNELFADHESSLKPIDVPRDWIWDLPRRTVYFGTSVTSIFRGLSTEQIQFCFWKGFVCVRGFEQKTRAPRPLMARLHFPASKLKNNKT

SEQ ID NO: 605 - protein, 1332 aa, Arabidopsis sp.
MEVEGEVREKEARVKGRQPETEVLHGLPQEQSIFNNMQHNHQPDSDRRRLSLENLPGLYNMSCTQLLALANATVATGSSIGASSSSLSSQHPTDSWINSWKMDSNPWTLSKMQKQQYDVSTPQKFLCDLNLTPEELVSTSTQRTEPESPQITLKTPGKSLSETDHEPHDRIKKSVLGTGSPAAVKKRKIARNDEKSQLETPTLKRKKIRPKVVREGKTKKASSKAGIKKSSIAATATKTSEESNYVRPKRLTRRSIRFDFDLQEEDEEFCGIDFTSAGHVEGSSGEENLTDTTLGMFGHVPKGRRGQRRSNGFKKTDNDCLSSMLSLVNTGPGSFMESEEDRPSDSQISLGRQRSIMATRPRNFRSLKKLLQRIIPSKRDRKGCKLPRGLPKLTVASKLQLKVFRKKRSQRNRVASQFNARILDLQWRRQNPTGTSLADIWERSLTIDAITKLFEELDINKEGLCLPHNRETALILYKKSYEEQKAIVKYSKKQKPKVQLDPETSRVWKLLMSSIDCDGVDGSDEEKRKWWEEERNMFHGRANSFIARMRVVQGNRTFSPWKGSVVDSVVGVFLTQNVADHSSSSAYMDLAAEFPVEWNFNKGSCHEEWGSSVTQETILNLDPRTGVSTPRIRNPTRVIIEEIDDDENDIDAVCSQESSKTSDSSITSADQSKTMLLDPFNTVLMNEQVDSQMVKGKGHIPYTDDLNDLSQGISMVSSASTHCELNLNEVPPEVELCSHQQDPESTIQTQDQQESTRTEDVKKNRKKPTTSKPKKKSKESAKSTQKKSVDWDSLRKEAESGGRKRERTERTMDTVDWDALRCTDVHKIANIIIKRGMNNMLAERIKAFLNRLVKKHGSIDLEWLRDVPPDKAKEYLLSINGLGLKSVECVRLLSLHQIAFPVDTNVGRIAVRLGWVPLQPLPDELQMHLLELYPVLESVQKYLWPRLCKLDQKTLYELHYHMITFGKVFCTKVKPNCNACPMKAECRHYSSARASARLALPEPEESDRTSVMIHERRSKRKPVVVNFRPSLFLYQEKEQEAQRSQNCEPIIEEPASPEPEYIEHDIEDYPRDKNNVGTSEDPWENKDVIPTIILNKEAGTSHDLVVNKEAGTSHDLVVLSTYAAAIPRRKLKIKEKLRTEHHVFELPDHHSILEGFERREAEDIVPYLLAIWTPGETVNSIQPPKQRCALFESNNTLCNENKCFQCNKTREEESQTVRGTILIPCRTAMRGGFPLNGTYFQTNEVFADHDSSINPIDVPTELIWDLKRRVAYLGSSVSSICKGLSVEAIKYNFQEGYVCVRGFDRENRKPKSLVKRLHCSHVAIRTKEKTEE

SEQ ID NO: 606 - protein, 1044 aa, Arabidopsis sp.
MLTDGSQHTYQNGETKNSKEHERKCDESAHLQDNSQTTHKKKEKKNSKEKHGIKHSESEHLQDDISQRVTGKGRRRNSKGTPKKLRFNRPRILEDGKKPRNPATTRLRTISNKRRKKDIDSEDEVIPELATPTKESFPKRRKNEKIKRSVARTLNFKQEIVLSCLEFDKICGPIFPRGKKRTTTRRRYDFLCFLLPMPVWKKQSRRSKRRKNMVRWARIASSSKLLEETLPLIVSHPTINGQADASLHIDDTLVRHVVSKQTKKSANNVIEHLNRQITYQKDHGLSSLADVPLHIEDTLIKSASSVLSERPIKKTKDIAKLIKDMGRLKINKKVTTMIKADKKLVTAKVNLDPETIKEWDVLMVNDSPSRSYDDKETEAKWKKEREIFQTRIDLFINRMHRLQGNRKFKQWKGSVVDSVVGVFLTQNTTDYLSSNAFMSVAAKFPVDAREGLSYYIEEPQDAKSSECIILSDESISKVEDHENTAKRKNEKTGIIEDEIVDWNNLRRMYTKEGSRPEMHMDSVNWSDVRLSGQNVLETTIKKRGQFRILSERILKFLNDEVNQNGNIDLEWLRNAPSHLVKRYLLEIEGIGLKSAECVRLLGLKHHAFPVDTNVGRIAVRLGLVPLEPLPNGVQMHQLFEYPSMDSIQKYLWPRLCKLPQETLYELHYQMITFGKVFCTKTIPNCNACPMKSECKYFASAYVSSKVLLESPEEKMHEPNTFMNAHSQDVAVDMTSNINLVEECVSSGCSDQAICYKPLVEFPSSPRAEIPESTDIEDVPFMNLYQSYASVPKIDFDLDALKKSVEDALVISGRMSSSDEEISKALVIPTPENACIPIKPPRKMKYYNRLRTEHVVYVLPDNHELLHDFERRKLDDPSPYLLAIWQPGETSSSFVPPKKKCSSDGSKLCKIKNCSYCWTIREQNSNIFRGTILIPCRTAMRGAFPLNGTYFQTNEVFADHETSLNPIVFRRELCKGLEKRALYCGSTVTSIFKLLDTRRIELCFWTGFLCLRAFDRKQRDPKELVRRLHTPPDERGPKFMSDDDI

SEQ ID NO: 607 - protein, 490 aa, Human alphaherpesvirus 1
MDLLVDELFADMNADGASPPPPRPAGGPKNTPAAPPLYATGRLSQAQLMPSPPMPVPPAALFNRLLDDLGFSAGPALCTMLDTWNEDLFSALPTNADLYRECKFLSTLPSDVVEWGDAYVPERTQIDIRAHGDVAFPTLPATRDGLGLYYEALSRFFHAELRAREESYRTVLANFCSALYRYLRASVRQLHRQAHMRGRDRDLGEMLRATIADRYYRETARLARVLFLHLYLFLTREILWAAYAEQMMRPDLFDCLCCDLESWRQLAGLFQPFMFVNGALTVRGVPIEARRLRELNHIREHLNLPLVRSAATEEPGAPLTTPPTLHGNQARASGYFMVLIRAKLDSYSSFTTSPSEAVMREHAYSRARTKNNYGSTIEGLLDLPDDDAPEEAGLAAPRLSFLPAGHTRRLSTAPPTDVSLGDELHLDGEDVAMAHADALDDFDLDMLGDGDSPGPGFTPHDSAPYGALDMADFEFEQMFTDALGIDEYGG

SEQ ID NO: 608 - protein, 49 aa, Human alphaherpesvirus 1
DALDDFDLDMLGSDALDDFDLDMLGSDALDDFDLDMLGSDALDDFDLDM

SEQ ID NO: 609 - protein, 129 aa, Human alphaherpesvirus 1
DALDDFDLDMLGSDALDDFDLDMLGSDALDDFDLDMLGSDALDDFDLDMLGSDALDDFDLDMLGSSDALDDFDLDMLGSDALDDFDLDMLGSDALDDFDLDMLGSDALDDFDLDMLGSDALDDFDLDML

SEQ ID NO: 610 - protein, 826 aa, Homo sapiens
MEGAGGANDKKKISSERRKEKSRDAARSRRSKESEVFYELAHQLPLPHNVSSHLDKASVMRLTISYLRVRKLLDAGDLDIEDDMKAQMNCFYLKALDGFVMVLTDDGDMIYISDNVNKYMGLTQFELTGHSVFDFTHPCDHEEMREMLTHRNGLVKKGKEQNTQRSFFLRMKCTLTSRGRTMNIKSATWKVLHCTGHIHVYDTNSNQPQCGYKKPPMTCLVLICEPIPHPSNIEIPLDSKTFLSRHSLDMKFSYCDERITELMGYEPEELLGRSIYEYYHALDSDHLTKTHHDMFTKGQVTTGQYRMLAKRGGYVWVETQATVIYNTKNSQPQCIVCVNYVVSGIIQHDLIFSLQQTECVLKPVESSDMKMTQLFTKVESEDTSSLFDKLKKEPDALTLLAPAAGDTIISLDFGSNDTETDDQQLEEVPLYNDVMLPSPNEKLQNINLAMSPLPTAETPKPLRSSADPALNQEVALKLEPNPESLELSFTMPQIQDQTPSPSDGSTRQSSPEPNSPSEYCFYVDSDMVNEFKLELVEKLFAEDTEAKNPFSTQDTDLDLEMLAPYIPMDDDFQLRSFDQLSPLESSSASPESASPQSTVTVFQQTQIQEPTANATTTTATTDELKTVTKDRMEDIKILIASPSPTHIHKETTSATSSPYRDTQSRTASPNRAGKGVIEQTEKSHPRSPNVLSVALSQRTTVPEEELNPKILALQNAQRKRKMEHDGSLFQAVGIGTLLQQPDDHAATTSLSWKRVKGCKSSEQNGMEQKTIILIPSDLACRLLGQSMDESGLPQLTSYDCEVNAPIQGSRNLLQGEELLRALDQVN

SEQ ID NO: 611 - protein, 270 aa, Homo sapiens
MADHMMAMNHGRFPDGTNGLHHHPAHRMGMGQFPSPHHHQQQQPQHAFNALMGEHIHYGAGNMNATSGIRHAMGPGTVNGGHPPSALAPAARFNNSQFMGPPVASQGGSLPASMQLQKLNNQYFNHHPYPHNHYMPDLHPAAGHQMNGTNQHFRDCNPKHSGGSSTPGGSGGSSTPGGSGSSSGGGAGSSNSGGGSGSGNMPASVAHVPAAMLPPNVIDTDFIDEEVLMSLVIEMGLDRIKELPELWLGQNEFDFMTDFVCKQQPSRVSC

SEQ ID NO: 612 - protein, 770 aa, Homo sapiens
MAQWNQLQQLDTRYLEQLHQLYSDSFPMELRQFLAPWIESQDWAYAASKESHATLVFHNLLGEIDQQYSRFLQESNVLYQHNLRRIKQFLQSRYLEKPMEIARIVARCLWEESRLLQTAATAAQQGGQANHPTAAVVTEKQQMLEQHLQDVRKRVQDLEQKMKVVENLQDDFDFNYKTLKSQGDMQDLNGNNQSVTRQKMQQLEQMLTALDQMRRSIVSELAGLLSAMEYVQKTLTDEELADWKRRQQIACIGGPPNICLDRLENWITSLAESQLQTRQQIKKLEELQQKVSYKGDPIVQHRPMLEERIVELFRNLMKSAFVVERQPCMPMHPDRPLVIKTGVQFTTKVRLLVKFPELNYQLKIKVCIDKDSGDVAALRGSRKFNILGTNTKVMNMEESNNGSLSAEFKHLTLREQRCGNGGRANCDASLIVTEELHLITFETEVYHQGLKIDLETHSLPVVVISNICQMPNAWASILWYNMLTNNPKNVNFFTKPPIGTWDQVAEVLSWQFSSTTKRGLSIEQLTTLAEKLLGPGVNYSGCQITWAKFCKENMAGKGFSFWVWLDNIIDLVKKYILALWNEGYIMGFISKERERAILSTKPPGTFLLRFSESSKEGGVTFTWVEKDISGKTQIQSVEPYTKQQLNNMSFAEIIMGYKIMDATNILVSPLVYLYPDIPKEEAFGKYCRPESQEHPEADPGSAAPYLKTKFICVTPTTCSNTIDLPMSPRTLDSLMQFGNNGEGAEPSAGGQFESLTFDMELTSECATSPM

SEQ ID NO: 613 - protein, 551 aa, Homo sapiens
MDELFPLIFPAEPAQASGPYVEIIEQPKQRGMRFRYKCEGRSAGSIPGERSTDTTKTHPTIKINGYTGPGTVRISLVTKDPPHRPHPHELVGKDCRDGFYEAELCPDRCIHSFQNLGIQCVKKRDLEQAISQRIQTNNNPFQVPIEEQRGDYDLNAVRLCFQVTVRDPSGRPLRLPPVLSHPIFDNRAPNTAELKICRVNRNSGSCLGGDEIFLLCDKVQKEDIEVYFTGPGWEARGSFSQADVHRQVAIVFRTPPYADPSLQAPVRVSMQLRRPSDRELSEPMEFQYLPDTDDRHRIEEKRKRTYETFKSIMKKSPFSGPTDPRPPPRRIAVPSRSSASVPKPAPQPYPFTSSLSTINYDEFPTMVFPSGQISQASALAPAPPQVLPQAPAPAPAPAMVSALAQAPAPVPVLAPGPPQAVAPPAPKPTQAGEGTLSEALLQLQFDDEDLGALLGNSTDPAVFTDLASVDNSEFQQLLNQGIPVAPHTTEPMLMEYPEAITRLVTGAQRPPDPAPAPLGAPGLPNGLLSGDEDFSSIADMDFSALLSQISS

SEQ ID NO: 614 - protein, 393 aa, Homo sapiens [sequence omitted]

SEQ ID NO: 615 - protein, 871 aa, Homo sapiens
MAEEFVTLKDVGMDFTLGDWEQLGLEQGDTFWDTALDNCQDLFLLDPPRPNLTSHPDGSEDLEPLAGGSPEATSPDVTETKNSPLMEDFFEEGFSQEIIEMLSKDGFWNSNFGEACIEDTWLDSLLGDPESLLRSDIATNGESPTECKSHELKRGLSPVSTVSTGEDSMVHNVSEKTLTPAKSKEYRGEFFSYSDHSQQDSVQEGEKPYQCSECGKSFSGSYRLTQHWITHTREKPTVHQECEQGFDRNASLSVYPKTHTGYKFYVCNEYGTTFSQSTYLWHQKTHTGEKPCKSQDSDHPPSHDTQPGEHQKTHTDSKSYNCNECGKAFTRIFHLTRHQKIHTRKRYECSKCQATFNLRKHLIQHQKTHAAKTTSECQECGKIFRHSSLLIEHQALHAGEEPYKCNERGKSFRHNSTLKIHQRVHSGEKPYKCSECGKAFHRHTHLNEHRRIHTGYRPHKCQECVRSFSRPSHLMRHQAIHTAEKPYSCAECKETFSDNNRLVQHQKMHTVKTPYECQECGERFICGSTLKCHESVHAREKQGFFVSGKILDQNPEQKEKCFKCNKCEKTFSCSKYLTQHERIHTRGVKPFECDQCGKAFGQSTRLIHHQRIHSRVRLYKWGEQGKAISSASLIKLQSFHTKEHPFKCNECGKTFSHSAHLSKHQLIHAGENPFKCSKCDRVFTQRNYLVQHERTHARKKPLVCNECGKTFRQSSCLSKHQRIHSGEKPYVCDYCGKAFGLSAELVRHQRIHTGEKPYVCQECGKAFTQSSCLSIHRRVHTGEKPYRCGECGKAFAQKANLTQHQRIHTGEKPYSCNVCGKAFVLSAHLNQHLRVHTQETLYQCQRCQKAFRCHSSLSRHQRVHNKQQYCL

SEQ ID NO: 616 - protein, 655 aa, Homo sapiens
MAEAPQVVEIDPDFEPLPRPRSCTWPLPRPEFSQSNSATSSPAPSGSAAANPDAAAGLPSASAAAVSADFMSNLSLLEESEDFPQAPGSVAAAVAAAAAAAATGGLCGDFQGPEAGCLHPAPPQPPPPGPLSQHPPVPPAAAGPLAGQPRKSSSSRRNAWGNLSYADLITKAIESSAEKRLTLSQIYEWMVKSVPYFKDKGDSNSSAGWKNSIRHNLSLHSKFIRVQNEGTGKSSWWMLNPEGGKSGKSPRRRAASMDNNSKFAKSRSRAAKKKASLQSGQEGAGDSPGSQFSKWPASPGSHSNDDFDNWSTFRPRTSSNASTISGRLSPIMTEQDDLGEGDVHSMVYPPSAAKMASTLPSLSEISNPENMENLLDNLNLLSSPTSLTVSTQSSPGTMMQQTPCYSFAPPNTSLNSPSPNYQKYTYGQSSMSPLPQMPIQTLQDNKSSYGGMSQYNCAPGLLKELLTSDSPPHNDIMTPVDPGVAQPNSRVLGQNVMMGPNSVMSTYGSQASHNKMMNPSSHTHPGHAQQTSAVNGRPLPHTVSTMPHTSGMNRLTQVKTPVQVPLPHPMQMSALGGYSSVSSCNGYGRMGLLHQEKLPSDLDGMFIERLDCDMESIIRNDLMDGDTLDFNFDNVLPNQSFPHSVKTTTHSWVSG

SEQ ID NO: 617 - protein, 612 aa, Homo sapiens
MARRPRHSIYSSDEDDEDFEMCDHDYDGLLPKSGKRHLGKTRWTREEDEKLKKLVEQNGTDDWKVIANYLPNRTDVQCQHRWQKVLNPELIKGPWTKEEDQRVIELVQKYGPKRWSVIAKHLKGRIGKQCRERWHNHLNPEVKKTSWTEEEDRIIYQAHKRLGNRWAEIAKLLPGRTDNAIKNHWNSTMRRKVEQEGYLQESSKASQPAVATSFQKNSHLMGFAQAPPTAQLPATGQPTVNNDYSYYHISEAQNVSSHVPYPVALHVNIVNVPQPAAAAIQRHYNDEDPEKEKRIKELELLLMSTENELKGQQVLPTQNHTCSYPGWHSTTIADHTRPHGDSAPVSCLGEHHSTPSLPADPGSLPEESASPARCMIVHQGTILDNVKNLLEFAETLQFIDSFLNTSSNHENSDLEMPSLTSTPLIGHKLTVTTPFHRDQTVKTQKENTVFRTPAIKRSILESSPRTPTPFKHALAAQEIKYGPLKMLPQTPSHLVEDLQDVIKQESDESGIVAEFQENGPPLLKKIKQEVESPTDKSGNFFCSHHWEGDSLNTQLFTQTSPVADAPNILTSSVLMAPASEDEDNVLKAFTVPKNRSLASPLQATKAQRLFQF

SEQ ID NO: 618 - protein, 634 aa, Homo sapiens
MATSNNPRKFSEKIALHNQKQAEETAAFEEVMKDLSLTRAARLQLQKSQYLQLGPSRGQYYGGSLPNVNQIGSGTMDLPFQTPFQSSGLDTSRTTRHHGLVDRVYRERGRLGSPHRRPLSVDKHGRQADSCPYGTMYLSPPADTSWRRTNSDSALHQSTMTPTQPESFSSGSQDVHQKRVLLLTVPGMEETTSEADKNLSKQAWDTKKTGSRPKSCEVPGINIFPSADQENTTALIPATHNTGGSLPDLTNIHFPSPLPTPLDPEEPTFPALSSSSSTGNLAANLTHLGIGGAGQGMSTPGSSPQHRPAGVSPLSLSTEARRQQASPTLSPLSPITQAVAMDALSLEQQLPYAFFTQAGSQQPPPQPQPPPPPPPASQQPPPPPPPQAPVRLPPGGPLLPSASLTRGPQPPPLAVTVPSSLPQSPPENPGQPSMGIDIASAPALQQYRTSAGSPANQSPTSPVSNQGFSPGSSPQHTSTLGSVFGDAYYEQQMAARQANALSHQLEQFNMMENAISSSSLYSPGSTLNYSQAAMMGLTGSHGSLPDSQQLGYASHSGIPNIILTVTGESPPSLSKELTSSLAGVGDVSFDSDSQFPLDELKIDPLTLDGLHMLNDPDMVLADPATEDTFRMDRL

SEQ ID NO: 619 - protein, 146 aa, Homo sapiens
MASAGVAAGRQAEDVLPPTSDQPLPDTKPLPPPQPPPVPAPQPQQSPAPRPQSPARAREEENYSFLPLVHNIIKCMDKDSPEVHQDLNALKSKFQEMRKLISTMPGIHLSPEQQQQQLQSLREQVRTKNELLQKYKSLCMFEIPKE

SEQ ID NO: 620 - protein, 387 aa, Homo sapiens
MTGKLAEKLPVTMSSLLNQLPDNLYPEEIPSALNLFSGSSDSVVHYNQMATENVMDIGLTNEKPNPELSYSGSFQPAPGNKTVTYLGKFAFDSPSNWCQDNIISLMSAGILGVPPASGALSTQTSTASMVQPPQGDVEAMYPALPPYSNCGDLYSEPVSFHDPQGNPGLAYSPQDYQSAKPALDSNLFPMIPDYNLYHHPNDMGSIPEHKPFQGMDPIRVNPPPITPLETIKAFKDKQIHPGFGSLPQPPLTLKPIRPRKYPNRPSKTPLHERPHACPAEGCDRRFSRSDELTRHLRIHTGHKPFQCRICMRSFSRSDHLTTHIRTHTGEKPFACEFCGRKFARSDERKRHAKIHLKQKEKKAEKGGAPSASSAPPVSLAPVVTTCA

SEQ ID NO: 621 - protein, 1590 aa, Homo sapiens
MSTPTDPGAMPHPGPSPGPGPSPGPILGPSPGPGPSPGSVHSMMGPSPGPPSVSHPMPTMGSTDFPQEGMHQMHKPIDGIHDKGIVEDIHCGSMKGTGMRPPHPGMGPPQSPMDQHSQGYMSPHPSPLGAPEHVSSPMSGGGPTPPQMPPSQPGALIPGDPQAMSQPNRGPSPFSPVQLHQLRAQILAYKMLARGQPLPETLQLAVQGKRTLPGLQQQQQQQQQQQQQQQQQQQQQQQPQQQPPQPQTQQQQQPALVNYNRPSGPGPELSGPSTPQKLPVPAPGGRPSPAPPAAAQPPAAAVPGPSVPQPAPGQPSPVLQLQQKQSRISPIQKPQGLDPVEILQEREYRLQARIAHRIQELENLPGSLPPDLRTKATVELKALRLLNFQRQLRQEVVACMRRDTTLETALNSKAYKRSKRQTLREARMTEKLEKQQKIEQERKRRQKHQEYLNSILQHAKDFKEYHRSVAGKIQKLSKAVATWHANTEREQKKETERIEKERMRRLMAEDEEGYRKLIDQKKDRRLAYLLQQTDEYVANLTNLVWEHKQAQAAKEKKKRRRRKKKAEENAEGGESALGPDGEPIDESSQMSDLPVKVTHTETGKVLFGPEAPKASQLDAWLEMNPGYEVAPRSDSEESDSDYEEEDEEEESSRQETEEKILLDPNSEEVSEKDAKQIIETAKQDVDDEYSMQYSARGSQSYYTVAHAISERVEKQSALLINGTLKHYQLQGLEWMVSLYNNNLNGILADEMGLGKTIQTIALITYLMEHKRLNGPYLIIVPLSTLSNWTYEFDKWAPSVVKISYKGTPAMRRSLVPQLRSGKFNVLLTTYEYIIKDKHILAKIRWKYMIVDEGHRMKNHHCKLTQVLNTHYVAPRRILLTGTPLQNKLPELWALLNFLLPTIFKSCSTFEQWFNAPFAMTGERVDLNEEETILIIRRLHKVLRPFLLRRLKKEVESQLPEKVEYVIKCDMSALQKILYRHMQAKGILLTDGSEKDKKGKGGAKTLMNTIMQLRKICNHPYMFQHIEESFAEHLGYSNGVINGAELYRASGKFELLDRILPKLRATNHRVLLFCQMTSLMTIMEDYFAFRNFLYLRLDGTTKSEDRAALLKKFNEPGSQYFIFLLSTRAGGLGLNLQAADTVVIFDSDWNPHQDLQAQDRAHRIGQQNEVRVLRLCTVNSVEEKILAAAKYKLNVDQKVIQAGMFDQKSSSHERRAFLQAILEHEEENEEEDEVPDDETLNQMIARREEEFDLFMRMDMDRRREDARNPKRKPRLMEEDELPSWIIKDDAEVERLTCEEEEEKIFGRGSRQRRDVDYSDALTEKQWLRAIEDGNLEEMEEEVRLKKRKRRRNVDKDPAKEDVEKAKKRRGRPPAEKLSPNPPKLTKQMNAIIDTVINYKDRCNVEKVPSNSQLEIEGNSSGRQLSEVFIQLPSRKELPEYYELIRKPVDFKKIKERIRNHKYRSLGDLEKDVMLLCHNAQTFNLEGSQIYEDSIVLQSVFKSARQKIAKEEESEDESNEEEEEEDEEESESEAKSVKVKIKLNKKDDKGRDKGKGKKRPNRGKAKPVVSDFDSDEEQDEREQSEGSGTDDE

SEQ ID NO: 622 - protein, 99 aa, Homo sapiens
MEPEQMLEGQTQVAENPHSEYGLTDNVERIVENEKINAEKSSKQKVDLQSLPTRAYLDQTVVPILLQGLAVLAKERPPNPIEFLASYLLKNKAQFEDRN

SEQ ID NO: 623 - protein, 1424 aa, Homo sapiens
MSGLGENLDPLASDSRKRKLPCDTPGQGLTCSGEKRRREQESKYIEELAELISANLSDIDNFNVKPDKCAILKETVRQIRQIKEQGKTISNDDDVQKADVSSTGQGVIDKDSLGPLLLQALDGFLFVVNRDGNIVFVSENVTQYLQYKQEDLVNTSVYNILHEEDRKDFLKNLPKSTVNGVSWTNETQRQKSHTFNCRMLMKTPHDILEDINASPEMRQRYETMQCFALSQPRAMMEEGEDLQSCMICVARRITTGERTFPSNPESFITRHDLSGKVVNIDTNSLRSSMRPGFEDIIRRCIQRFFSLNDGQSWSQKRHYQEAYLNGHAETPVYRFSLADGTIVTAQTKSKLFRNPVTNDRHGFVSTHFLQREQNGYRPNPNPVGQGIRPPMAGCNSSVGGMSMSPNQGLQMPSSRAYGLADPSTTGQMSGARYGGSSNIASLTPGPGMQSPSSYQNNNYGLNMSSPPHGSPGLAPNQQNIMISPRNRGSPKIASHQFSPVAGVHSPMASSGNTGNHSFSSSSLSALQAISEGVGTSLLSTLSSPGPKLDNSPNMNITQPSKVSNQDSKSPLGFYCDQNPVESSMCQSNSRDHLSDKESKESSVEGAENQRGPLESKGHKKLLQLLTCSSDDRGHSSLTNSPLDSSCKESSVSVTSPSGVSSSTSGGVSSTSNMHGSLLQEKHRILHKLLQNGNSPAEVAKITAEATGKDTSSITSCGDGNVVKQEQLSPKKKENNALLRYLLDRDDPSDALSKELQPQVEGVDNKMSQCTSSTIPSSSQEKDPKIKTETSEEGSGDLDNLDAILGDLTSSDFYNNSISSNGSHLGTKQQVFQGTNSLGLKSSQSVQSIRPPYNRAVSLDSPVSVGSSPPVKNISAFPMLPKQPMLGGNPRMMDSQENYGSSMGGPNRNVTVTQTPSSGDWGLPNSKAGRMEPMNSNSMGRPGGDYNTSLPRPALGGSIPTLPLRSNSIPGARPVLQQQQQMLQMRPGEIPMGMGANPYGQAAASNQLGSWPDGMLSMEQVSHGTQNRPLLRNSLDDLVGPPSNLEGQSDERALLDQLHTLLSNTDATGLEEIDRALGIPELVNQGQALEPKQDAFQGQEAAVMMDQKAGLYGQTYPAQGPPMQGGFHLQGQSPSFNSMMNQMNQQGNFPLQGMHPRANIMRPRTNTPKQLRMQLQQRLQGQQFLNQSRQALELKMENPTAGGAAVMRPMMQPQVSSQQGFLNAQMVAQRSRELLSHHFRQQRVAMMMQQQQQQQQQQQQQQQQQQQQQQQQQQQQQTQAFSPPPNVTASPSMDGLLAGPTMPQAPPQQFPYQPNYGMGQQPDPAFGRVSSPPNAMMSSRMGPSQNPMMQHPQAASIYQSSEMKGWPSGNLARNSSFSQQQFAHQGNPAVYSMVHMNGSSGHMGQMNMNPMPMSGMPMGPDQKYC

SEQ ID NO: 624 - protein, 868 aa, Homo sapiens
MRGAASASVREPTPLPGRGAPRTKPRAGRGPTVGTPATLALPARGRPRSRNGLASKGQRGAAPTGPGHRALPSRDTALPQERNKKLEAVGTGIEPKAMSQGLVTFGDVAVDFSQEEWEWLNPIQRNLYRKVMLENYRNLASLGLCVSKPDVISSLEQGKEPWTVKRKMTRAWCPDLKAVWKIKELPLKKDFCEGKLSQAVITERLTSYNLEYSLLGEHWDYDALFETQPGLVTIKNLAVDFRQQLHPAQKNFCKNGIWENNSDLGSAGHCVAKPDLVSLLEQEKEPWMVKRELTGSLFSGQRSVHETQELFPKQDSYAEGVTDRTSNTKLDCSSFRENWDSDYVFGRKLAVGQETQFRQEPITHNKTLSKERERTYNKSGRWFYLDDSEEKVHNRDSIKNFQKSSVVIKQTGIYAGKKLFKCNECKKTFTQSSSLTVHQRIHTGEKPYKCNECGKAFSDGSSFARHQRCHTGKKPYECIECGKAFIQNTSLIRHWRYYHTGEKPFDCIDCGKAFSDHIGLNQHRRIHTGEKPYKCDVCHKSFRYGSSLTVHQRIHTGEKPYECDVCRKAFSHHASLTQHQRVHSGEKPFKCKECGKAFRQNIHLASHLRIHTGEKPFECAECGKSFSISSQLATHQRIHTGEKPYECKVCSKAFTQKAHLAQHQKTHTGEKPYECKECGKAFSQTTHLIQHQRVHTGEKPYKCMECGKAFGDNSSCTQHQRLHTGQRPYECIECGKAFKTKSSLICHRRSHTGEKPYECSVCGKAFSHRQSLSVHQRIHSGKKPYECKECRKTFIQIGHLNQHKRVHTGERSYNYKKSRKVFRQTAHLAHHQRIHTGESSTCPSLPSTSNPVDLFPKFLWNPSSLPSP

SEQ ID NO: 625 - protein, 587 aa, Homo sapiens
MPTALCPRVLAPKESEEPRKMRSPPGENPSPQGELPSPESSRRLFRRFRYQEAAGPREALQRLWDLCGGWLRPERHTKEQILELLVLEQFLAILPREIQSWVRAQEPESGEQAVAAVEALEREPGRPWQWLKHCEDPVVIDDGDSPLDQEQEQLPVEPHSDLAKNQDAQPITLAQCLGLPSRPPSQLSGDPVLQDAFLLQEENVRDTQQVTTLQLPPSRVSPFKDMILCFSEEDWSLLDPAQTGFYGEFIIGEDYGVSMPPNDLAAQPDLSQGEENEPRVPELQDLQGKEVPQVSYLDSPSLQPFQVEERRKREELQVPEFQACPQTVVPQNTYPAGGNPRSLENSLDEEVTIEIVLSSSGDEDSQHGPYCTEELGSPTEKQRSLPASHRSSTEAGGEVQTSKKSYVCPNCGKIFRWRVNFIRHLRSRREQEKPHECSVCGELFSDSEDLDGHLESHEAQKPYRCGACGKSFRLNSHLLSHRRIHLQPDRLQPVEKREQAASEDADKGPKEPLENGKAKLSFQCCECGKAFQRHDHLARHRSHFHLKDKARPFQCRYCVKSFTQNYDLLRHERLHMKRRSKQALNSY

SEQ ID NO: 626 - protein, 424 aa, Homo sapiens
MASMPPTPEAQGPILFEDLAVYFSQEECVTLHPAQRSLSKDGTKESLEDAALMGEEGKPEINQQLSLESMELDELALEKYPIAAPLVPYPEKSSEDGVGNPEAKILSGTPTYKRRVISLLVTIENHTPLVELSEYLGTNTLSEILDSPWEGAKNVYKCPECDQNFSDHSYLVLHQKIHSGEKKHKCGDCGKIFNHRANLRTHRRIHTGEKPYKCAKCSASFRQHSHLSRHMNSHVKEKPYTCSICGRGFMWLPGLAQHQKSHSAENTYESTNCDKHFNEKPNLALPEETFVSGPQYQHTKCMKSFRQSLYPALSEKSHDEDSERCSDDGDNFFSFSKFKPLQCPDCDMTFPCFSELISHQNIHTEERPHKCKTCEESFALDSELACHQKSHMLAEPFKCTVCGKTFKSNLHLITHKRTHIKNTT

SEQ ID NO: 627 - protein, 495 aa, Homo sapiens
MDLPVGPGAAGPSNVPAFLTKLWTLVSDPDTDALICWSPSGNSFHVFDQGQFAKEVLPKYFKHNNMASFVRQLNMYGFRKVVHIEQGGLVKPERDDTEFQHPCFLRGQEQLLENIKRKVTSVSTLKSEDIKIRQDSVTKLLTDVQLMKGKQECMDSKLLAMKHENEALWREVASLRQKHAQQQKVVNKLIQFLISLVQSNRILGVKRKIPLMLNDSGSAHSMPKYSRQFSLEHVHGSGPYSAPSPAYSSSSLYAPDAVASSGPIISDITELAPASPMASPGGSIDERPLSSSPLVRVKEEPPSPPQSPRVEEASPGRPSSVDTLLSPTALIDSILRESEPAPASVTALTDARGHTDTEGRPPSPPPTSTPEKCLSVACLDNLARTPQMSRVARLFPCPSSSPHGQVQPGNELSDHLDAMDSNLDNLQTMLSSHGFSVDTSALLDIQELLSPQEPPRPPEAENSSPDSAGALHSAAAVPAGPRLRGHREQRPAGAV

SEQ ID NO: 628 - protein, 605 aa, Human gammaherpesvirus 4
MRPKKDGLEDFLRLTPEIKKQLGSLVSDYCNVLNKEFTAGSVEITLRSYKICKAFINEAKAHGREWGGLMATLNICNFWAILRNNRVRRRAENAGNDACSIACPIVMRYVLDHLIVVTDRFFIQAPSNRVMIPATIGTAMYKLLKHSRVRAYTYSKVLGVDRAAIMASGKQVVEHLNRMEKEGLLSSKFKAFCKWVFTYPVLEEMFQTMVSSKTGHLTDDVKDVRALIKTLPRASYSSHAGQRSYVSGVLPACLLSTKSKAVETPILVSGADRMDEELMGNDGGASHTEARYSESGQFHAFTDELESLPSPTMPLKPGAQSADCGDSSSSSSDSGNSDTEQSEREEARAEAPRLRAPKSRRTSRPNRGQTPCPSNAAEPEQPWIAAVHQESDERPIFPHPSKPTFLPPVKRKKGLRDSREGMFLPKPEAGSAISDVFEGREVCQPKRIRPFHPPGSPWANRPLPASLAPTPTGPVHEPVGSLTPAPVPQPLDPAPAVTPEASHLLEDPDEETSQAVKALREMADTVIPQKEEAAICGQMDLSHPPPRGHLDELTTTLESMTEDLNLDSPLTPELNEILDTFLNDECLLHAMHISTGLSIFDTSLF

SEQ ID NO: 629 - protein, 80 aa, Homo sapiens
KENLLAGPSENDPNLFVALYDFVASGDNTLSITKGEKLRVLGYNHNGEWCEAQTKNGQGWVPSNYITPVNSLEKHSWYHG

SEQ ID NO: 630 - protein, 80 aa, Homo sapiens
KSDKQIKNGECDKAYLDELVELHRRLMTLRERHILQQIVNLIEETGHFHITNTTFDFDLCSLDKTTVRKLQSYLETSGTS

SEQ ID NO: 631 - protein, 80 aa, Homo sapiens
ECSEAGLLQEGVQPEEFVAIADYAATDETQLSFLRGEKILILRQTTADWWWGERAGCCGYIPANHVGKHVDEYDPEDTWQ

SEQ ID NO: 632 - protein, 80 aa, Homo sapiens
GSPSYGSPEDTDSFWNPNAFETDSDLPAGWMRVQDTSGTYYWHIPTGTTQWEPPGRASPSQGSSPQEESQLTWTGFAHGE

SEQ ID NO: 633 - protein, 80 aa, Homo sapiens
DLAPPRKALFTYPKGAGEMLEDGSERFLCESVFSYQVASTLKQVKHDQQVARMEKLAGLVEELEADEWRFKPIEQLLGFT

SEQ ID NO: 634 - protein, 80 aa, Homo sapiens
PEPAAAPVSTSELKKVVALYDYMPMNANDLQLRKGDEYFILEESNLPWWRARDKNGQEGYIPSNYVTEAEDSIEMYEWYS

SEQ ID NO: 635 - protein, 80 aa, Homo sapiens
SGGEEANLLLPELGSAFYDMASGFTVGTLSETSTGGPATPTWKECPICKERFPAESDKDALEDHMDGHFFFSTQDPFTFE

SEQ ID NO: 636 - protein, 80 aa, Homo sapiens
GPNIILTGDSSPGFSKEIAAALAGVPGFEVSAAGLELGLGLEDELRMEPLGLEGLNMLSDPCALLPDPAVEESFRSDRLQ

SEQ ID NO: 637 - protein, 80 aa, Homo sapiens
NCGSLPNTILPEDSSTSLFKDLNSALAGLPEVSLNVDTPFPLEEELQIEPLSLDGLNMLSDSSMGLLDPSVEETFRADRL

SEQ ID NO: 638 - protein, 80 aa, Homo sapiens
AGEDSKSENGENAPIYCICRKPDINCFMIGCDNCNEWFHGDCIRITEKMAKAIREWYCRECREKDPKLEIRYRHKKSRER

SEQ ID NO: 639 - protein, 80 aa, Homo sapiens
PLSLGEDFYREAIEHCRSYNARLCAERSLRLPFLDSQTGVAQNNCYIWMEKTHRGPGLAPGQIYTYPARCWRKKRRLNIL

SEQ ID NO: 640 - protein, 80 aa, Homo sapiens
EYGLTDNVERIVENEKINAEKSSKQKVDLQSLPTRAYLDQTVVPILLQGLAVLAKERPPNPIEFLASYLLKNKAQFEDRN

SEQ ID NO: 641 - protein, 80 aa, Homo sapiens
TVTYLGKFAFDSPSNWCQDNIISLMSAGILGVPPASGALSTQTSTASMVQPPQGDVEAMYPALPPYSNCGDLYSEPVSFH

SEQ ID NO: 642 - protein, 80 aa, Homo sapiens
SKPEKILKKGTYDKAYTDELVELHRRLMALRERNVLQQIVNLIEETGHFNVTNTTFDFDLFSLDETTVRKLQSCLEAVAT

SEQ ID NO: 643 - protein, 80 aa, Homo sapiens
LLVQRTEGFSGLDVAHLCQEAVVGPLHAMPATDLSAIMPSQLRPVTYQDFENAFCKIQPSISQKELDMYVEWNKMFGCSQ

SEQ ID NO: 644 - protein, 80 aa, Homo sapiens; identical to SEQ ID NO: 576

SEQ ID NO: 645 - protein, 80 aa, Homo sapiens; identical to SEQ ID NO: 555

SEQ ID NO: 646 - protein, 80 aa, Homo sapiens
LVGSSLEGAVTPQTSAWLPPTSAEHDHSLSCVVTPQDGETSAQMIEENLNCLGHLSTIIHEANEEQGNSMMNLDWSWLTE

SEQ ID NO: 647 - protein, 80 aa, Homo sapiens
RLGEQEAKRNGTGINPYCALIEEAYGLDKIEFLQSHENQEIYQKAFDLIEHYFGTEDEDSSIAPQVDLNQQQYIFQQCEA

SEQ ID NO: 648 - protein, 80 aa, Homo sapiens
SGLIIPLTISGGSGPRPLNPVTQAPLPPGWEQRVDQHGRVYYVDHVEKRTTWDRPEPLPPGWERRVDNMGRIYYVDHFTR

SEQ ID NO: 649 - protein, 80 aa, Homo sapiens
PRPELPLPEGWEEARDFDGKVYYIDHTNRTTSWIDPRDRYTKPLTFADCISDELPLGWEEAYDPQVGDYFIDHNTKTTQI

SEQ ID NO: 650 - protein, 80 aa, Homo sapiens
QGHPFFRNVDWDMMEQKQVVPPFKPNISGEFGLDNFDSQFTNEPVQLTPDDDDIVRKIDQSEFEGFEYINPLLMSAEECV

SEQ ID NO: 651 - protein, 80 aa, Homo sapiens
HMNWDDLLAWRVDPPFRPCLQSEEDVSQFDTRFTRQTPVDSPDDTALSESANQAFLGFTYVAPSVLDSIKEGFSFQPKLR

SEQ ID NO: 652 - protein, 80 aa, Homo sapiens
GAVNGAVGTTFQPQNPLLGRACESCYATQSHQWYSWGPPNMQCRLCAICWLYWKKYGGLKMPTQSEEEKLSPSPTTEDPR

SEQ ID NO: 653 - protein, 80 aa, Homo sapiens
EAQNVSSHVPYPVALHVNIVNVPQPAAAAIQRHYNDEDPEKEKRIKELELLLMSTENELKGQQVLPTQNHTCSYPGWHST

SEQ ID NO: 654 - protein, 80 aa, Homo sapiens
FYIPVQIPGYQYVSPEGNCIEHVQPTSAFIQQPFIDEDPDKEKKIKELEMLLMSAENEVRRKRIPSQPGSFSSWSGSFLM

SEQ ID NO: 655 - protein, 80 aa, Homo sapiens
PFGSSPDDLLCPHPAAESPSDEGALLDQLYLALRNFDGLEEIDRALGIPELVSQSQAVDPEQFSSQDSNIMLEQKAPVFP

SEQ ID NO: 656 - protein, 80 aa, Homo sapiens
LRNSLDDLVGPPSNLEGQSDERALLDQLHTLLSNTDATGLEEIDRALGIPELVNQGQALEPKQDAFQGQEAAVMMDQKAG

SEQ ID NO: 657 - protein, 80 aa, Homo sapiens
LCHILDYSFGGGAGRDIPPPLIEEACELPECQEDAGNKVCSLQCNNHACGWDGGDCSLNFNDPWKNCTQSLQCWKYFSDG

SEQ ID NO: 658 - protein, 80 aa, Homo sapiens; identical to SEQ ID NO: 567

SEQ ID NO: 659 - protein, 80 aa, Homo sapiens
EACNSHACQWDGGDCSLTMENPWANCSSPLPCWDYINNQCDELCNTVECLFDNFECQGNSKTCKYDKYCADHFKDNHCDQ

SEQ ID NO: 660 - protein, 80 aa, Homo sapiens
TNKILTGGADKNVVVFDKSSEQILATLKGHTKKVTSVVFHPSQDLVFSASPDATIRIWSVPNASCVQVVRAHESAVTGLS

SEQ ID NO: 661 - protein, 80 aa, Homo sapiens
RHGHSSSDPVYPCGICTNEVNDDQDAILCEASCQKWFHRICTGMTETAYGLLTAEASAVWGCDTCMADKDVQLMRTRETF

SEQ ID NO: 662 - protein, 80 aa, Homo sapiens
SGPQPPPGLVYPCGACRSEVNDDQDAILCEASCQKWFHRECTGMTESAYGLLTTEASAVWACDLCLKTKEIQSVYIREGM

SEQ ID NO: 663 - protein, 80 aa, Homo sapiens
HASGIGRVAATSLGNLTNHGSEDLPLPPGWSVDWTMRGRKYYIDHNTNTTHWSHPLEREGLPPGWERVESSEFGTYYVDH

SEQ ID NO: 664 - protein, 80 aa, Homo sapiens; identical to SEQ ID NO: 595

SEQ ID NO: 665 - protein, 80 aa, Homo sapiens
MYTKKNVPSKSKAAASATREWTEQETLLLLEALEMYKDDWNKVSEHVGSRTQDECILHFLRLPIEDPYLEDSEASLGPLA

SEQ ID NO: 666 - protein, 80 aa, Homo sapiens
SQTVPEPDQGPVSQPVPEPDLPCDLRHLNTEPMEIFRNCVKIEEIMPNGDPLLAGQNTVDEVYVSRPSHFYTDGPLMPSD

SEQ ID NO: 667 - protein, 80 aa, Homo sapiens
SSGYKFGVLAKIVNYMKTRHQRGDTHPLTLDEILDETQHLDIGLKQKQWLMTEALVNNPKIEVIDGKYAFKPKYNVRDKK

SEQ ID NO: 668 - protein, 80 aa, Homo sapiens
VEVQEHYDSFFEEVFTELQEKYGEIEEMNVCDNLGDHLVGNVYVKFRREEDGERAVAELSNRWFNGQAVHGELSPVTDFR

SEQ ID NO: 669 - protein, 80 aa, Homo sapiens
YYDLISGASQWEKPEGFQGDLKKTAVKTVWVEGLSEDGFTYYYNTETGESRWEKPDDFIPHTSDLPSSKVNENSLGTLDE

SEQ ID NO: 670 - protein, 80 aa, Homo sapiens
AMQQFNQRYLYSASMLAAENDPYGPLPPGWEKRVDSTDRVYFVNHNTKTTQWEDPRTQGLQNEEPLPEGWEIRYTREGVR

SEQ ID NO: 671 - protein, 80 aa, Homo sapiens
AMQHFSQRFLYQSSSASTDHDPLGPLPPGWEKRQDNGRVYYVNHNTRTTQWEDPRTQGMIQEPALPPGWEMKYTSEGVRY

SEQ ID NO: 672 - protein, 80 aa, Homo sapiens
GAAGSPAQQHAHLRQQSYDVTDELPLPPGWEMTFTATGQRYFLNHIEKITTWQDPRKAMNQPLNHMNLHPAVSSTPVPQR

SEQ ID NO: 673 - protein, 80 aa, Homo sapiens
LEYSLLGEHWDYDALFETQPGLVTIKNLAVDFRQQLHPAQKNFCKNGIWENNSDLGSAGHCVAKPDLVSLLEQEKEPWMV

SEQ ID NO: 674 - protein, 80 aa, Homo sapiens
AEEFVTLKDVGMDFTLGDWEQLGLEQGDTFWDTALDNCQDLFLLDPPRPNLTSHPDGSEDLEPLAGGSPEATSPDVTETK

SEQ ID NO: 675 - protein, 80 aa, Homo sapiens
QEENVRDTQQVTTLQLPPSRVSPFKDMILCFSEEDWSLLDPAQTGFYGEFIIGEDYGVSMPPNDLAAQPDLSQGEENEPR

SEQ ID NO: 676 - protein, 80 aa, Homo sapiens
ASMPPTPEAQGPILFEDLAVYFSQEECVTLHPAQRSLSKDGTKESLEDAALMGEEGKPEINQQLSLESMELDELALEKYP

SEQ ID NO: 677 - protein, 2414 aa, Homo sapiens
MAENVVEPGPPSAKRPKLSSPALSASASDGTDFGSLFDLEHDLPDELINSTELGLTNGGDINQLQTSLGMVQDAASKHKQLSELLRSGSSPNLNMGVGGPGQVMASQAQQSSPGLGLINSMVKSPMTQAGLTSPNMGMGTSGPNQGPTQSTGMMNSPVNQPAMGMNTGMNAGMNPGMLAAGNGQGIMPNQVMNGSIGAGRGRQNMQYPNPGMGSAGNLLTEPLQQGSPQMGGQTGLRGPQPLKMGMMNNPNPYGSPYTQNPGQQIGASGLGLQIQTKTVLSNNLSPFAMDKKAVPGGGMPNMGQQPAPQVQQPGLVTPVAQGMGSGAHTADPEKRKLIQQQLVLLLHAHKCQRREQANGEVRQCNLPHCRTMKNVLNHMTHCQSGKSCQVAHCASSRQIISHWKNCTRHDCPVCLPLKNAGDKRNQQPILTGAPVGLGNPSSLGVGQQSAPNLSTVSQIDPSSIERAYAALGLPYQVNQMPTQPQVQAKNQQNQQPGQSPQGMRPMSNMSASPMGVNGGVGVQTPSLLSDSMLHSAINSQNPMMSENASVPSLGPMPTAAQPSTTGIRKQWHEDITQDLRNHLVHKLVQAIFPTPDPAALKDRRMENLVAYARKVEGDMYESANNRAEYYHLLAEKIYKIQKELEEKRRTRLQKQNMLPNAAGMVPVSMNPGPNMGQPQPGMTSNGPLPDPSMIRGSVPNQMMPRITPQSGLNQFGQMSMAQPPIVPRQTPPLQHHGQLAQPGALNPPMGYGPRMQQPSNQGQFLPQTQFPSQGMNVTNIPLAPSSGQAPVSQAQMSSSSCPVNSPIMPPGSQGSHIHCPQLPQPALHQNSPSPVPSRTPTPHHTPPSIGAQQPPATTIPAPVPTPPAMPPGPQSQALHPPPRQTPTPPTTQLPQQVQPSLPAAPSADQPQQQPRSQQSTAASVPTPTAPLLPPQPATPLSQPAVSIEGQVSNPPSTSSTEVNSQAIAEKQPSQEVKMEAKMEVDQPEPADTQPEDISESKVEDCKMESTETEERSTELKTEIKEEEDQPSTSATQSSPAPGQSKKKIFKPEELRQALMPTLEALYRQDPESLPFRQPVDPQLLGIPDYFDIVKSPMDLSTIKRKLDTGQYQEPWQYVDDIWLMFNNAWLYNRKTSRVYKYCSKLSEVFEQEIDPVMQSLGYCCGRKLEFSPQTLCCYGKQLCTIPRDATYYSYQNRYHFCEKCFNEIQGESVSLGDDPSQPQTTINKEQFSKRKNDTLDPELFVECTECGRKMHQICVLHHEIIWPAGFVCDGCLKKSARTRKENKFSAKRLPSTRLGTFLENRVNDFLRRQNHPESGEVTVRVVHASDKTVEVKPGMKARFVDSGEMAESFPYRTKALFAFEEIDGVDLCFFGMHVQEYGSDCPPPNQRRVYISYLDSVHFFRPKCLRTAVYHEILIGYLEYVKKLGYTTGHIWACPPSEGDDYIFHCHPPDQKIPKPKRLQEWYKKMLDKAVSERIVHDYKDIFKQATEDRLTSAKELPYFEGDFWPNVLEESIKELEQEEEERKREENTSNESTDVTKGDSKNAKKKNNKKTSKNKSSLSRGNKKKPGMPNVSNDLSQKLYATMEKHKEVFFVIRLIAGPAANSLPPIVDPDPLIPCDLMDGRDAFLTLARDKHLEFSSLRRAQWSTMCMLVELHTQSQDRFVYTCNECKHHVETRWHCTVCEDYDLCITCYNTKNHDHKMEKLGLGLDDESNNQQAAATQSPGDSRRLSIQRCIQSLVHACQCRNANCSLPSCQKMKRVVQHTKGCKRKTNGGCPICKQLIALCCYHAKHCQENKCPVPFCLNIKQKLRQQQLQHRLQQAQMLRRRMASMQRTGVVGQQQGLPSPTPATPTTPTGQQPTTPQTPQPTSQPQPTPPNSMPPYLPRTQAAGPVSQGKAAGQVTPPTPPQTAQPPLPGPPPAAVEMAMQIQRAAETQRQMAHVQIFQRPIQHQMPPMTPMAPMGMNPPPMTRGPSGHLEPGMGPTGMQQQPPWSQGGLPQPQQLQSGMPRPAMMSVAQHGQPLNMAPQPGLGQVGISPLKPGTVSQQALQNLLRTLRSPSSPLQQQQVLSILHANPQLLAAFIKQRAAKYANSNPQPIPGQPGMPQGQPGLQPPTMPGQQGVHSNPAMQNMNPMQAGVQRAGLPQQQPQQQLQPPMGGMSPQAQQMNMNHNTMPSQFRDILRRQQMMQQQQQQGAGPGIGPGMANHNQFQQPQGVGYPPQQQQRMQHHMQQMQQGNMGQIGQLPQALGAEAGASLQAYQQRLLQQQMGSPVQPNPMSPQQHMLPNQAQSPHLQGQQIPNSLSNQVRSPQPVPSPRPQSQPPHSSPSPRMQPQPSPHHVSPQTSSPHPGLVAAQANPMEQGHFASPDQNSMLSQLASNPGMANLHGASATDLGLSTDNSDLNSNLSQSTLDIH

SEQ ID NO: 678 - protein, 2442 aa, unidentified
  REGION 1..2442: note = Description of Unknown: CREBBP sequence
MAENLLDGPPNPKRAKLSSPGFSANDSTDFGSLFDLENDLPDELIPNGGELGLLNSGNLVPDAASKHKQLSELLRGGSGSSINPGIGNVSASSPVQQGLGGQAQGQPNSANMASLSAMGKSPLSQGDSSAPSLPKQAASTSGPTPAASQALNPQAQKQVGLATSSPATSQTGPGICMNANFNQTHPGLLNSNSGHSLINQASQGQAQVMNGSLGAAGRGRGAGMPYPTPAMQGASSSVLAETLTQVSPQMTGHAGLNTAQAGGMAKMGITGNTSPFGQPFSQAGGQPMGATGVNPQLASKQSMVNSLPTFPTDIKNTSVTNVPNMSQMQTSVGIVPTQAIATGPTADPEKRKLIQQQLVLLLHAHKCQRREQANGEVRACSLPHCRTMKNVLNHMTHCQAGKACQVAHCASSRQIISHWKNCTRHDCPVCLPLKNASDKRNQQTILGSPASGIQNTIGSVGTGQQNATSLSNPNPIDPSSMQRAYAALGLPYMNQPQTQLQPQVPGQQPAQPQTHQQMRTLNPLGNNPMNIPAGGITTDQQPPNLISESALPTSLGATNPLMNDGSNSGNIGTLSTIPTAAPPSSTGVRKGWHEHVTQDLRSHLVHKLVQAIFPTPDPAALKDRRMENLVAYAKKVEGDMYESANSRDEYYHLLAEKIYKIQKELEEKRRSRLHKQGILGNQPALPAPGAQPPVIPQAQPVRPPNGPLSLPVNRMQVSQGMNSFNPMSLGNVQLPQAPMGPRAASPMNHSVQMNSMGSVPGMAISPSRMPQPPNMMGAHTNNMMAQAPAQSQFLPQNQFPSSSGAMSVGMGQPPAQTGVSQGQVPGAALPNPLNMLGPQASQLPCPPVTQSPLHPTPPPASTAAGMPSLQHTTPPGMTPPQPAAPTQPSTPVSSSGQTPTPTPGSVPSATQTQSTPTVQAAAQAQVTPQPQTPVQPPSVATPQSSQQQPTPVHAQPPGTPLSQAAASIDNRVPTPSSVASAETNSQQPGPDVPVLEMKTETQAEDTEPDPGESKGEPRSEMMEEDLQGASQVKEETDIAEQKSEPMEVDEKKPEVKVEVKEEEESSSNGTASQSTSPSQPRKKIFKPEELRQALMPTLEALYRQDPESLPFRQPVDPQLLGIPDYFDIVKNPMDLSTIKRKLDTGQYQEPWQYVDDVWLMFNNAWLYNRKTSRVYKFCSKLAEVFEQEIDPVMQSLGYCCGRKYEFSPQTLCCYGKQLCTIPRDAAYYSYQNRYHFCEKCFTEIQGENVTLGDDPSQPQTTISKDQFEKKKNDTLDPEPFVDCKECGRKMHQICVLHYDIIWPSGFVCDNCLKKTGRPRKENKFSAKRLQTTRLGNHLEDRVNKFLRRQNHPEAGEVFVRVVASSDKTVEVKPGMKSRFVDSGEMSESFPYRTKALFAFEEIDGVDVCFFGMHVQEYGSDCPPPNTRRVYISYLDSIHFFRPRCLRTAVYHEILIGYLEYVKKLGYVTGHIWACPPSEGDDYIFHCHPPDQKIPKPKRLQEWYKKMLDKAFAERIIHDYKDIFKQATEDRLTSAKELPYFEGDFWPNVLEESIKELEQEEEERKKEESTAASETTEGSQGDSKNAKKKNNKKTNKNKSSISRANKKKPSMPNVSNDLSQKLYATMEKHKEVFFVIHLHAGPVINTLPPIVDPDPLLSCDLMDGRDAFLTLARDKHWEFSSLRRSKWSTLCMLVELHTQGQDRFVYTCNECKHHVETRWHCTVCEDYDLCINCYNTKSHAHKMVKWGLGLDDEGSSQGEPQSKSPQESRRLSIQRCIQSLVHACQCRNANCSLPSCQKMKRVVQHTKGCKRKTNGGCPVCKQLIALCCYHAKHCQENKCPVPFCLNIKHKLRQQQIQHRLQQAQLMRRRMATMNTRNVPQQSLPSPTSAPPGTPTQQPSTPQTPQPPAQPQPSPVSMSPAGFPSVARTQPPTTVSTGKPTSQVPAPPPPAQPPPAAVEAARQIEREAQQQQHLYRVNINNSMPPGRTGMGTPGSQMAPVSLNVPRPNQVSGPVMPSMPPGQWQQAPLPQQQPMPGLPRPVISMQAQAAVAGPRMPSVQPPRSISPSALQDLLRTLKSPSSPQQQQQVLNILKSNPQLMAAFIKQRTAKYVANQPGMQPQPGLQSQPGMQPQPGMHQQPSLQNLNAMQAGVPRPGVPPQQQAMGGLNPQGQALNIMNPGHNPNMASMNPQYREMLRRQLLQQQQQQQQQQQQQQQQQQGSAGMAGGMAGHGQFQQPQGPGGYPPAMQQQQRMQQHLPLQGSSMGQMAAQMGQLGQMGQPGLGADSTPNIQQALQQRILQQQQMKQQIGSPGQPNPMSPQQHMLSGQPQASHLPGQQIATSLSNQVRSPAPVQSPRPQSQPPHSSPSPRIQPQPSPHHVSPQTGSPHPGLAVTMASSIDQGHLGNPEQSAMLPQLNTPSRSALSSELSLVGDTTGDTLEKFVEGL

SEQ ID NO: 679 - protein, 16 aa, synthetic construct
  REGION 1..16: note = Description of Artificial Sequence: Synthetic peptide
SGSETPGTSESATPES

SEQ ID NO: 680 - protein, 4 aa, synthetic construct
  REGION 1..4: note = Description of Artificial Sequence: Synthetic peptide
SGGS

SEQ ID NO: 681 - protein, 24 aa, synthetic construct
  REGION 1..24: note = Description of Artificial Sequence: Synthetic peptide
SGGSSGSETPGTSESATPESSGGS

SEQ ID NO: 682 - protein, 32 aa, synthetic construct
  REGION 1..32: note = Description of Artificial Sequence: Synthetic polypeptide
SGGSSGGSSGSETPGTSESATPESSGGSSGGS

SEQ ID NO: 683 - protein, 104 aa, synthetic construct
  REGION 1..104: note = Description of Artificial Sequence: Synthetic polypeptide
GGSGGSPGSPAGSPTSTEEGTSESATPESGPGTSTEPSEGSAPGSPAGSPTSTEEGTSTEPSEGSAPGTSTEPSEGSAPGTSESATPESGPGSEPATSGGSGGS

SEQ ID NO: 684 - protein, 16 aa, synthetic construct
  REGION 1..16: note = Description of Artificial Sequence: Synthetic peptide
SGSETPGTSESATPES

SEQ ID NO: 685 - protein, 24 aa, synthetic construct
  REGION 1..24: note = Description of Artificial Sequence: Synthetic peptide
SGGSSGGSSGSETPGTSESATPES

SEQ ID NO: 686 - protein, 40 aa, synthetic construct
  REGION 1..40: note = Description of Artificial Sequence: Synthetic polypeptide
SGGSSGGSSGSETPGTSESATPESSGGSSGGSSGGSSGGS

SEQ ID NO: 687 - protein, 64 aa, synthetic construct
  REGION 1..64: note = Description of Artificial Sequence: Synthetic polypeptide
SGGSSGGSSGSETPGTSESATPESSGGSSGGSSGGSSGGSSGSETPGTSESATPESSGGSSGGS

SEQ ID NO: 688 - protein, 92 aa, synthetic construct
  REGION 1..92: note = Description of Artificial Sequence: Synthetic polypeptide
PGSPAGSPTSTEEGTSESATPESGPGTSTEPSEGSAPGSPAGSPTSTEEGTSTEPSEGSAPGTSTEPSEGSAPGTSESATPESGPGSEPATS

SEQ ID NO: 689 - protein, 7 aa, synthetic construct
  REGION 1..7: note = Description of Artificial Sequence: Synthetic peptide
PKKKRKV

SEQ ID NO: 690 - protein, 20 aa, synthetic construct
  REGION 1..20: note = Description of Artificial Sequence: Synthetic peptide
AVKRPAATKKAGQAKKKKLD

SEQ ID NO: 691 - protein, 25 aa, synthetic construct
  REGION 1..25: note = Description of Artificial Sequence: Synthetic peptide
MSRRRKANPTKLSENAKKLAKEVEN

SEQ ID NO: 692 - protein, 9 aa, synthetic construct
  REGION 1..9: note = Description of Artificial Sequence: Synthetic peptide
PAAKRVKLD

SEQ ID NO: 693 - protein, 9 aa, synthetic construct
  REGION 1..9: note = Description of Artificial Sequence: Synthetic peptide
KLKIKRPVK

SEQ ID NO: 694 - protein, 30 aa, synthetic construct
  REGION 1..30: note = Description of Artificial Sequence: Synthetic polypeptide
MDSLLMNRRKFLYQFKNVRWAKGRRETYLC

SEQ ID NO: 695 - DNA, 400 bp, synthetic construct
  misc_feature 1..400: note = Description of Artificial Sequence: Synthetic polynucleotide
  source 1..400: mol_type = other DNA
gtacgtcgtctttaggttggggggaggggttttatgcgatggagtttccccacactgagtgggtggagactgaagttaggccagcttggcacttgatgtaattctccttggaatttgccctttttgagtttggatcttggttcattctcaagcctcagacagtggttcaaagtttttttcttccatttcaggtgtcgtgacgctagcgctaccggtcgccaccatggtgagcaagggcgccgagctgttcaccggcatcgtgcccatcctgatcgagctgaatggcgatgtgaatggccacaagttcagcgtgagcggcgagggcgagggcgatgccacctacggcaagctgaccctgaagttcatctgcaccaccggcaagctgcctgtgccctggccc

SEQ ID NO: 696 - DNA, 19 bp, synthetic construct
  misc_feature 1..19: note = Description of Artificial Sequence: Synthetic oligonucleotide
  source 1..19: mol_type = other DNA
taggttggggggaggggtt

SEQ ID NO: 697 - DNA, 19 bp, synthetic construct
  misc_feature 1..19: note = Description of Artificial Sequence: Synthetic oligonucleotide
  source 1..19: mol_type = other DNA
gtgggtggagactgaagtt

SEQ ID NO: 698 - DNA, 19 bp, synthetic construct
  misc_feature 1..19: note = Description of Artificial Sequence: Synthetic oligonucleotide
  source 1..19: mol_type = other DNA
tgggcacgatgccggtgaa

SEQ ID NO: 699 - DNA, 18 bp, synthetic construct
  misc_feature 1..18: note = Description of Artificial Sequence: Synthetic oligonucleotide
  source 1..18: mol_type = other DNA
ggcgagggcgagggcgat

SEQ ID NO: 700 - DNA, 18 bp, synthetic construct
  misc_feature 1..18: note = Description of Artificial Sequence: Synthetic oligonucleotide
  source 1..18: mol_type = other DNA
gagggcgagggcgatgcc

SEQ ID NO: 701 - DNA, 18 bp, synthetic construct
  misc_feature 1..18: note = Description of Artificial Sequence: Synthetic oligonucleotide
  source 1..18: mol_type = other DNA
gccggtggtgcagatgaa

SEQ ID NO: 702 - DNA, 19 bp, synthetic construct
  misc_feature 1..19: note = Description of Artificial Sequence: Synthetic oligonucleotide
  source 1..19: mol_type = other DNA
gcagcttgccggtggtgca

SEQ ID NO: 703 - protein, 182 aa, synthetic construct
  REGION 1..182: note = Description of Artificial Sequence: Synthetic polypeptide
  MOD_RES 19..25: note = This region may encompass one of the following sequences: "HKSSLTR" or "IKAILTR" or "TSTLLNR" or "QQTNLTR" or "RKPNLLR" or "VRHNLTR" or "DSSVLRR" or "DGSTLNR" or "QSTTLKR" or "DKAQLGR"
  MOD_RES 47..53: note = This region may encompass one of the following sequences: "RTEHLAR" or "RREHLVR" or "QQTNLTR" or "QTNNLGR" or "IRHHLKR" or "EAHHLSR" or "ESGHLKR" or "LSTNLTR" or "VRHNLTR" or "VGSNLTR" or "VDHHLRR"
  MOD_RES 59..67: note = This region may encompass one of the following sequences: "TGSQKP" or "TGGGGSQKP"
  MOD_RES 79..85: note = This region may encompass one of the following sequences: "QSAHLKR" or "TSAHLAR" or "DEANLRR" or "DRGNLTR" or "DSSVLRR" or "DGSTLNR" or "RQDNLGR" or "LKEHLTR" or "SPSKLVR" or "DKAQLGR" or "QSTTLKR" or "EAHHLSR" or "RQSRLQR"
  MOD_RES 107..113: note = This region may encompass one of the following sequences: "RTEHLAR" or "RREHLVR" or "QSAHLKR" or "QGGHLKR" or "LSTNLTR" or "VRHNLTR" or "KNHSLNN" or "RVDNLPR" or "RQDNLGR" or "EAHHLSR" or "VDHHLRR" or "DPSNLRR" or "DSSVLRR"
  MOD_RES 119..127: note = This region may encompass one of the following sequences: "TGSQKP" or "TGGGGSQKP"
  MOD_RES 139..145: note = This region may encompass one of the following sequences: "HKSSLTR" or "IPNKLAR" or "EAHHLSR" or "QSTTLKR" or "RQDNLGR" or "LKEHLTR" or "SPSKLVR" or "RQSRLQR" or "QRSDLTR" or "TKQILGR"
  MOD_RES 167..173: note = This region may encompass one of the following sequences: "RPESLAP" or "RREVLEN" or "RKDALHV" or "RSDHLSL" or "KNHSLNN" or "RVDNLPR" or "RQDNLGR" or "KGDHLRR" or "DPSNLRR" or "QGGTLRR" or "QSTTLKR"
  REGION 1..182: note = See specification as filed for detailed description of substitutions and preferred embodiments
SRPGERPFQCRICMRNFSXXXXXXXHTRTHTGEKPFQCRICMRNFSXXXXXXXHLRTHXXXXXXXXXFQCRICMRNFSXXXXXXXHTRTHTGEKPFQCRICMRNFSXXXXXXXHLRTHXXXXXXXXXFQCRICMRNFSXXXXXXXHTRTHTGEKPFQCRICMRNFSXXXXXXXHLRTHLRGS

SEQ ID NO: 704 - protein, 6 aa, synthetic construct
  REGION 1..6: note = Description of Artificial Sequence: Synthetic peptide
TGSQKP

SEQ ID NO: 705 - protein, 9 aa, synthetic construct
  REGION 1..9: note = Description of Artificial Sequence: Synthetic peptide
TGGGGSQKP

SEQ ID NO: 706-715 - skipped (10 entries)

SEQ ID NO: 716 - protein, 7 aa, synthetic construct
  REGION 1..7: note = Description of Artificial Sequence: Synthetic peptide
HKSSLTR

SEQ ID NO: 717 - protein, 7 aa, synthetic construct
  REGION 1..7: note = Description of Artificial Sequence: Synthetic peptide
HKSSLTR

SEQ ID NO: 718 - protein, 7 aa, synthetic construct
  REGION 1..7: note = Description of Artificial Sequence: Synthetic peptide
IKAILTR

SEQ ID NO: 719 - protein, 7 aa, synthetic construct
  REGION 1..7: note = Description of Artificial Sequence: Synthetic peptide
IKAILTR

SEQ ID NO: 720 - protein, 7 aa, synthetic construct
  REGION 1..7: note = Description of Artificial Sequence: Synthetic peptide
TSTLLNR

SEQ ID NO: 721 - protein, 7 aa, synthetic construct
  REGION 1..7: note = Description of Artificial Sequence: Synthetic peptide
TSTLLNR

SEQ ID NO: 722 - protein, 7 aa, synthetic construct
  REGION 1..7: note = Description of Artificial Sequence: Synthetic peptide
TSTLLNR

SEQ ID NO: 723 - protein, 7 aa, synthetic construct
  REGION 1..7: note = Description of Artificial Sequence: Synthetic peptide
TSTLLNR

SEQ ID NO: 724 - protein, 7 aa, synthetic construct
  REGION 1..7: note = Description of Artificial Sequence: Synthetic peptide
HKSSLTR

SEQ ID NO: 725 - protein, 7 aa, synthetic construct
  REGION 1..7: note = Description of Artificial Sequence: Synthetic peptide
HKSSLTR

SEQ ID NO: 726 - protein, 7 aa, synthetic construct
  REGION 1..7: note = Description of Artificial Sequence: Synthetic peptide
HKSSLTR

SEQ ID NO: 727 - protein, 7 aa, synthetic construct
  REGION 1..7: note = Description of Artificial Sequence: Synthetic peptide
HKSSLTR

SEQ ID NO: 728 - protein, 7 aa, synthetic construct
  REGION 1..7: note = Description of Artificial Sequence: Synthetic peptide
QQTNLTR

SEQ ID NO: 729 - protein, 7 aa, synthetic construct
  REGION 1..7: note = Description of Artificial Sequence: Synthetic peptide
QQTNLTR

SEQ ID NO: 730 - protein, 7 aa, synthetic construct
  REGION 1..7: note = Description of Artificial Sequence: Synthetic peptide
RKPNLLR

SEQ ID NO: 731 - protein, 7 aa, synthetic construct
  REGION 1..7: note = Description of Artificial Sequence: Synthetic peptide
RKPNLLR

SEQ ID NO: 732 - protein, 7 aa, synthetic construct
  REGION 1..7: note = Description of Artificial Sequence: Synthetic peptide
VRHNLTR

SEQ ID NO: 733 - protein, 7 aa, synthetic construct
  REGION 1..7: note = Description of Artificial Sequence: Synthetic peptide
DSSVLRR

SEQ ID NO: 734 - protein, 7 aa, synthetic construct
  REGION 1..7: note = Description of Artificial Sequence: Synthetic peptide
DSSVLRR

SEQ ID NO: 735 - protein, 7 aa, synthetic construct
  REGION 1..7: note = Description of Artificial Sequence: Synthetic peptide
DSSVLRR

SEQ ID NO: 736 - protein, 7 aa, synthetic construct
  REGION 1..7: note = Description of Artificial Sequence: Synthetic peptide
DSSVLRR

SEQ ID NO: 737 - protein, 7 aa, synthetic construct
  REGION 1..7: note = Description of Artificial Sequence: Synthetic peptide
DGSTLNR

SEQ ID NO: 738 - protein, 7 aa, synthetic construct
  REGION 1..7: note = Description of Artificial Sequence: Synthetic peptide
DGSTLNR

SEQ ID NO: 739 - protein, 7 aa, synthetic construct
  REGION 1..7: note = Description of Artificial Sequence: Synthetic peptide
DGSTLNR

SEQ ID NO: 740 - protein, 7 aa, synthetic construct
  REGION 1..7: note = Description of Artificial Sequence: Synthetic peptide
DGSTLNR

SEQ ID NO: 741 - protein, 7 aa, synthetic construct
  REGION 1..7: note = Description of Artificial Sequence: Synthetic peptide
RKPNLLR

SEQ ID NO: 742 - protein, 7 aa, synthetic construct
  REGION 1..7: note = Description of Artificial Sequence: Synthetic peptide
RKPNLLR

SEQ ID NO: 743 - protein, 7 aa, synthetic construct
  REGION 1..7: note = Description of Artificial Sequence: Synthetic peptide
RKPNLLR

SEQ ID NO: 744 - protein, 7 aa, synthetic construct
  REGION 1..7: note = Description of Artificial Sequence: Synthetic peptide
RKPNLLR

SEQ ID NO: 745 - protein, 7 aa, synthetic construct
  REGION 1..7: note = Description of Artificial Sequence: Synthetic peptide
QQTNLTR

SEQ ID NO: 746 - protein, 7 aa, synthetic construct
  REGION 1..7: note = Description of Artificial Sequence: Synthetic peptide
QQTNLTR

SEQ ID NO: 747 - protein, 7 aa, synthetic construct
  REGION 1..7: note = Description of Artificial Sequence: Synthetic peptide
QQTNLTR

SEQ ID NO: 748 - protein, 7 aa, synthetic construct
  REGION 1..7: note = Description of Artificial Sequence: Synthetic peptide
QQTNLTR

SEQ ID NO: 749 - protein, 7 aa, synthetic construct
  REGION 1..7: note = Description of Artificial Sequence: Synthetic peptide
QSTTLKR

SEQ ID NO: 750 - protein, 7 aa, synthetic construct
  REGION 1..7: note = Description of Artificial Sequence: Synthetic peptide
QSTTLKR

SEQ ID NO: 751 - protein, 7 aa, synthetic construct
  REGION 1..7: note = Description of Artificial Sequence: Synthetic peptide
QSTTLKR

SEQ ID NO: 752 - protein, 7 aa, synthetic construct
  REGION 1..7: note = Description of Artificial Sequence: Synthetic peptide
QSTTLKR

SEQ ID NO: 753 - protein, 7 aa, synthetic construct
  REGION 1..7: note = Description of Artificial Sequence: Synthetic peptide
DKAQLGR

SEQ ID NO: 754 - protein, 7 aa, synthetic construct
  REGION 1..7: note = Description of Artificial Sequence: Synthetic peptide
DKAQLGR

SEQ ID NO: 755 - protein, 7 aa, synthetic construct
  REGION 1..7: note = Description of Artificial Sequence: Synthetic peptide
DKAQLGR

SEQ ID NO: 756 - protein, 7 aa, synthetic construct
  REGION 1..7: note = Description of Artificial Sequence: Synthetic peptide
DKAQLGR

SEQ ID NO: 757 - protein, 7 aa, synthetic construct
  REGION 1..7: note = Description of Artificial Sequence: Synthetic peptide
RTEHLAR

SEQ ID NO: 758 - protein, 7 aa, synthetic construct
  REGION 1..7: note = Description of Artificial Sequence: Synthetic peptide
RTEHLAR

SEQ ID NO: 759 - protein, 7 aa, synthetic construct
  REGION 1..7: note = Description of Artificial Sequence: Synthetic peptide
RREHLVR

SEQ ID NO: 760 - protein, 7 aa, synthetic construct
  REGION 1..7: note = Description of Artificial Sequence: Synthetic peptide
RREHLVR

SEQ ID NO: 761 - protein, 7 aa, synthetic construct
  REGION 1..7: note = Description of Artificial Sequence: Synthetic peptide
QQTNLTR

SEQ ID NO: 762 - protein, 7 aa, synthetic construct
  REGION 1..7: note = Description of Artificial Sequence: Synthetic peptide
QQTNLTR

SEQ ID NO: 763 - protein, 7 aa, synthetic construct
  REGION 1..7: note = Description of Artificial Sequence: Synthetic peptide
QQTNLTR

SEQ ID NO: 764 - protein, 7 aa, synthetic construct
  REGION 1..7: note = Description of Artificial Sequence: Synthetic peptide
QQTNLTR

SEQ ID NO: 765 - protein, 7 aa, synthetic construct
  REGION 1..7: note = Description of Artificial Sequence: Synthetic peptide
QTNNLGR

SEQ ID NO: 766 - protein, 7 aa, synthetic construct
  REGION 1..7: note = Description of Artificial Sequence: Synthetic peptide
QTNNLGR

SEQ ID NO: 767 - protein, 7 aa, synthetic construct
  REGION 1..7: note = Description of Artificial Sequence: Synthetic peptide
QTNNLGR

SEQ ID NO: 768 - protein, 7 aa, synthetic construct
  REGION 1..7: note = Description of Artificial Sequence: Synthetic peptide
QTNNLGR

SEQ ID NO: 769 - protein, 7 aa, synthetic construct
  REGION 1..7: note = Description of Artificial Sequence: Synthetic peptide
IRHHLKR

SEQ ID NO: 770 - protein, 7 aa, synthetic construct
  REGION 1..7: note = Description of Artificial Sequence: Synthetic peptide
IRHHLKR

SEQ ID NO: 771 - protein, 7 aa, synthetic construct
  REGION 1..7: note = Description of Artificial Sequence: Synthetic peptide
EAHHLSR

SEQ ID NO: 772 - protein, 7 aa, synthetic construct
  REGION 1..7: note = Description of Artificial Sequence: Synthetic peptide
EAHHLSR

SEQ ID NO: 773 - protein, 7 aa, synthetic construct
  REGION 1..7: note = Description of Artificial Sequence: Synthetic peptide
ESGHLKR

SEQ ID NO: 774 - protein, 7 aa, synthetic construct
  REGION 1..7: note = Description of Artificial Sequence: Synthetic peptide
LSTNLTR

SEQ ID NO: 775 - protein, 7 aa, synthetic construct
  REGION 1..7: note = Description of Artificial Sequence: Synthetic peptide
LSTNLTR

SEQ ID NO: 776 - protein, 7 aa, synthetic construct
  REGION 1..7: note = Description of Artificial Sequence: Synthetic peptide
LSTNLTR

SEQ ID NO: 777 - protein, 7 aa, synthetic construct
  REGION 1..7: note = Description of Artificial Sequence: Synthetic peptide
LSTNLTR

SEQ ID NO: 778 - protein, 7 aa, synthetic construct
  REGION 1..7: note = Description of Artificial Sequence: Synthetic peptide
VRHNLTR

SEQ ID NO: 779 - protein, 7 aa, synthetic construct
  REGION 1..7: note = Description of Artificial Sequence: Synthetic peptide
VRHNLTR

SEQ ID NO: 780 - protein, 7 aa, synthetic construct
  REGION 1..7: note = Description of Artificial Sequence: Synthetic peptide
VRHNLTR

SEQ ID NO: 781 - protein, 7 aa, synthetic construct
  REGION 1..7: note = Description of Artificial Sequence: Synthetic peptide
VRHNLTR

SEQ ID NO: 782 - protein, 7 aa, synthetic construct
  REGION 1..7: note = Description of Artificial Sequence: Synthetic peptide
VRHNLTR

SEQ ID NO: 783 - protein, 7 aa, synthetic construct
  REGION 1..7: note = Description of Artificial Sequence: Synthetic peptide
VRHNLTR

SEQ ID NO: 784 - protein, 7 aa, synthetic construct
  REGION 1..7: note = Description of Artificial Sequence: Synthetic peptide
VRHNLTR

SEQ ID NO: 785 - protein, 7 aa, synthetic construct
  REGION 1..7: note = Description of Artificial Sequence: Synthetic peptide
VRHNLTR

SEQ ID NO: 786 - protein, 7 aa, synthetic construct
  REGION 1..7: note = Description of Artificial Sequence: Synthetic peptide
VGSNLTR

SEQ ID NO: 787 - protein, 7 aa, synthetic construct
  REGION 1..7: note = Description of Artificial Sequence: Synthetic peptide
VGSNLTR

SEQ ID NO: 788 - protein, 7 aa, synthetic construct
  REGION 1..7: note = Description of Artificial Sequence: Synthetic peptide
VGSNLTR

SEQ ID NO: 789 - protein, 7 aa, synthetic construct
  REGION 1..7: note = Description of Artificial Sequence: Synthetic peptide
VGSNLTR

SEQ ID NO: 790 - protein, 7 aa, synthetic construct
  REGION 1..7: note = Description of Artificial Sequence: Synthetic peptide
VDHHLRR

SEQ ID NO: 791 - protein, 7 aa, synthetic construct
  REGION 1..7: note = Description of Artificial Sequence: Synthetic peptide
VDHHLRR

SEQ ID NO: 792 - protein, 7 aa, synthetic construct
  REGION 1..7: note = Description of Artificial Sequence: Synthetic peptide
VDHHLRR

SEQ ID NO: 793 - protein, 7 aa, synthetic construct
  REGION 1..7: note = Description of Artificial Sequence: Synthetic peptide
VDHHLRR

SEQ ID NO: 794 - protein, 7 aa, synthetic construct
  REGION 1..7: note = Description of Artificial Sequence: Synthetic peptide
EAHHLSR

SEQ ID NO: 795 - protein, 7 aa, synthetic construct
  REGION 1..7: note = Description of Artificial Sequence: Synthetic peptide
EAHHLSR

SEQ ID NO: 796 - protein, 7 aa, synthetic construct
  REGION 1..7: note = Description of Artificial Sequence: Synthetic peptide
EAHHLSR

SEQ ID NO: 797 - protein, 7 aa, synthetic construct
  REGION 1..7: note = Description of Artificial Sequence: Synthetic peptide
EAHHLSR

SEQ ID NO: 798 - protein, 7 aa, synthetic construct
  REGION 1..7: note = Description of Artificial Sequence: Synthetic peptide
QSAHLKR

SEQ ID NO: 799 - protein, 7 aa, synthetic construct
  REGION 1..7: note = Description of Artificial Sequence: Synthetic peptide
TSAHLAR

SEQ ID NO: 800 - protein, 7 aa, synthetic construct
  REGION 1..7: note = Description of Artificial Sequence: Synthetic peptide
QSAHLKR

SEQ ID NO: 801 - protein, 7 aa, synthetic construct
  REGION 1..7: note = Description of Artificial Sequence: Synthetic peptide
TSAHLAR

SEQ ID NO: 802 - protein, 7 aa, synthetic construct
  REGION 1..7: note = Description of Artificial Sequence: Synthetic peptide
DEANLRR

SEQ ID NO: 803 - protein, 7 aa, synthetic construct
  REGION 1..7: note = Description of Artificial Sequence: Synthetic peptide
DEANLRR

SEQ ID NO: 804 - protein, 7 aa, synthetic construct
  REGION 1..7: note = Description of Artificial Sequence: Synthetic peptide
DRGNLTR

SEQ ID NO: 805 - protein, 7 aa, synthetic construct
  REGION 1..7: note = Description of Artificial Sequence: Synthetic peptide
DRGNLTR

SEQ ID NO: 806 - protein, 7 aa, synthetic construct
  REGION 1..7: note = Description of Artificial Sequence: Synthetic peptide
DEANLRR

SEQ ID NO: 807 - protein, 7 aa, synthetic construct
  REGION 1..7: note = Description of Artificial Sequence: Synthetic peptide
DEANLRR

SEQ ID NO: 808 - protein, 7 aa, synthetic construct
  REGION 1..7: note = Description of Artificial Sequence: Synthetic peptide
DRGNLTR

SEQ ID NO: 809 - protein, 7 aa, synthetic construct
  REGION 1..7: note = Description of Artificial Sequence: Synthetic peptide
DRGNLTR

SEQ ID NO: 810 - protein, 7 aa, synthetic construct
  REGION 1..7: note = Description of Artificial Sequence: Synthetic peptide
DSSVLRR

SEQ ID NO: 811 - protein, 7 aa, synthetic construct
  REGION 1..7: note = Description of Artificial Sequence: Synthetic peptide
DGSTLNR

SEQ ID NO: 812 - protein, 7 aa, synthetic construct
  REGION 1..7: note = Description of Artificial Sequence: Synthetic peptide
DSSVLRR

SEQ ID NO: 813 - protein, 7 aa, synthetic construct
  REGION 1..7: note = Description of Artificial Sequence: Synthetic peptide
DGSTLNR

SEQ ID NO: 814 - protein, 7 aa, synthetic construct
  REGION 1..7: note = Description of Artificial Sequence: Synthetic peptide
RQDNLGR

SEQ ID NO: 815 - protein, 7 aa, synthetic construct
  REGION 1..7: note = Description of Artificial Sequence: Synthetic peptide
LKEHLTR

SEQ ID NO: 816 - protein, 7 aa, synthetic construct
  REGION 1..7: note = Description of Artificial Sequence: Synthetic peptide
LKEHLTR

SEQ ID NO: 817 - protein, 7 aa, synthetic construct
  REGION 1..7: note = Description of Artificial Sequence: Synthetic peptide
SPSKLVR

SEQ ID NO: 818 - protein, 7 aa, synthetic construct
  REGION 1..7: note = Description of Artificial Sequence: Synthetic peptide
SPSKLVR

SEQ ID NO: 819 - protein, 7 aa, synthetic construct
  REGION 1..7: note = Description of Artificial Sequence: Synthetic peptide
LKEHLTR

SEQ ID NO: 820 - protein, 7 aa, synthetic construct
  REGION 1..7: note = Description of Artificial Sequence: Synthetic peptide
LKEHLTR

SEQ ID NO: 821 - protein, 7 aa, synthetic construct
  REGION 1..7: note = Description of Artificial Sequence: Synthetic peptide
SPSKLVR

SEQ ID NO: 822 - protein, 7 aa, synthetic construct
  REGION 1..7: note = Description of Artificial Sequence: Synthetic peptide
SPSKLVR

SEQ ID NO: 823 - protein, 7 aa, synthetic construct
  REGION 1..7: note = Description of Artificial Sequence: Synthetic peptide
DKAQLGR

SEQ ID NO: 824 - protein, 7 aa, synthetic construct
  REGION 1..7: note = Description of Artificial Sequence: Synthetic peptide
DKAQLGR

SEQ ID NO: 825 - protein, 7 aa, synthetic construct
  REGION 1..7: note = Description of Artificial Sequence: Synthetic peptide
QSTTLKR

SEQ ID NO: 826 - protein, 7 aa, synthetic construct
  REGION 1..7: note = Description of Artificial Sequence: Synthetic peptide
QSTTLKR

SEQ ID NO: 827 - protein, 7 aa, synthetic construct
  REGION 1..7: note = Description of Artificial Sequence: Synthetic peptide
DKAQLGR

SEQ ID NO: 828 - protein, 7 aa, synthetic construct
  REGION 1..7: note = Description of Artificial Sequence: Synthetic peptide
DKAQLGR

SEQ ID NO: 829 - protein, 7 aa, synthetic construct
  REGION 1..7: note = Description of Artificial Sequence: Synthetic peptide
QSTTLKR

SEQ ID NO: 830 - protein, 7 aa, synthetic construct
  REGION 1..7: note = Description of Artificial Sequence: Synthetic peptide
QSTTLKR

SEQ ID NO: 831 - protein, 7 aa, synthetic construct
  REGION 1..7: note = Description of Artificial Sequence: Synthetic peptide
EAHHLSR

SEQ ID NO: 832 - protein, 7 aa, synthetic construct
  REGION 1..7: note = Description of Artificial Sequence: Synthetic peptide
EAHHLSR

SEQ ID NO: 833 - protein, 7 aa, synthetic construct
  REGION 1..7: note = Description of Artificial Sequence: Synthetic peptide
RQSRLQR

SEQ ID NO: 834 - protein, 7 aa, synthetic construct
  REGION 1..7: note = Description of Artificial Sequence: Synthetic peptide
RQSRLQR

SEQ ID NO: 835 - protein, 7 aa, synthetic construct
  REGION 1..7: note = Description of Artificial Sequence: Synthetic peptide
EAHHLSR

SEQ ID NO: 836 - protein, 7 aa, synthetic construct
  REGION 1..7: note = Description of Artificial Sequence: Synthetic peptide
EAHHLSR

SEQ ID NO: 837 - protein, 7 aa, synthetic construct
  REGION 1..7: note = Description of Artificial Sequence: Synthetic peptide
RQSRLQR

SEQ ID NO: 838 - protein, 7 aa, synthetic construct
  REGION 1..7: note = Description of Artificial Sequence: Synthetic peptide
RQSRLQR

SEQ ID NO: 839 - protein, 7 aa, synthetic construct
  REGION 1..7: note = Description of Artificial Sequence: Synthetic peptide
RTEHLAR

SEQ ID NO: 840 - protein, 7 aa, synthetic construct
  REGION 1..7: note = Description of Artificial Sequence: Synthetic peptide
RREHLVR

SEQ ID NO: 841 - protein, 7 aa, synthetic construct
  REGION 1..7: note = Description of Artificial Sequence: Synthetic peptide
RTEHLAR

SEQ ID NO: 842 - protein, 7 aa, synthetic construct
  REGION 1..7: note = Description of Artificial Sequence: Synthetic peptide
RREHLVR

SEQ ID NO: 843 - protein, 7 aa, synthetic construct
  REGION 1..7: note = Description of Artificial Sequence: Synthetic peptide
QSAHLKR

SEQ ID NO: 844 - protein, 7 aa, synthetic construct
  REGION 1..7: note = Description of Artificial Sequence: Synthetic peptide
QSAHLKR

SEQ ID NO: 845 - protein, 7 aa, synthetic construct
  REGION 1..7: note = Description of Artificial Sequence: Synthetic peptide
QGGHLKR

SEQ ID NO: 846 - protein, 7 aa, synthetic construct
  REGION 1..7: note = Description of Artificial Sequence: Synthetic peptide
QGGHLKR

SEQ ID NO: 847 - protein, 7 aa, synthetic construct
  REGION 1..7: note = Description of Artificial Sequence: Synthetic peptide
QSAHLKR

SEQ ID NO: 848 - protein, 7 aa, synthetic construct
  REGION 1..7: note = Description of Artificial Sequence: Synthetic peptide
QSAHLKR

SEQ ID NO: 849 - protein, 7 aa, synthetic construct
  REGION 1..7: note = Description of Artificial Sequence: Synthetic peptide
QGGHLKR

SEQ ID NO: 850 - protein, 7 aa, synthetic construct
  REGION 1..7: note = Description of Artificial Sequence: Synthetic peptide
QGGHLKR

SEQ ID NO: 851 - protein, 7 aa, synthetic construct
  REGION 1..7: note = Description of Artificial Sequence: Synthetic peptide
LSTNLTR

SEQ ID NO: 852 - protein, 7 aa, synthetic construct
  REGION 1..7: note = Description of Artificial Sequence: Synthetic peptide
VRHNLTR

SEQ ID NO: 853 - protein, 7 aa, synthetic construct
  REGION 1..7: note = Description of Artificial Sequence: Synthetic peptide
LSTNLTR

SEQ ID NO: 854 - protein, 7 aa, synthetic construct
  REGION 1..7: note = Description of Artificial Sequence: Synthetic peptide
VRHNLTR

SEQ ID NO: 855 - protein, 7 aa, synthetic construct
  REGION 1..7: note = Description of Artificial Sequence: Synthetic peptide
KNHSLNN

SEQ ID NO: 856 - protein, 7 aa, synthetic construct
  REGION 1..7: note = Description of Artificial Sequence: Synthetic peptide
RVDNLPR

SEQ ID NO: 857 - protein, 7 aa, synthetic construct
  REGION 1..7: note = Description of Artificial Sequence: Synthetic peptide
RVDNLPR

SEQ ID NO: 858 - protein, 7 aa, synthetic construct
  REGION 1..7: note = Description of Artificial Sequence: Synthetic peptide
RQDNLGR

SEQ ID NO: 859 - protein, 7 aa, synthetic construct
  REGION 1..7: note = Description of Artificial Sequence: Synthetic peptide
RQDNLGR

SEQ ID NO: 860 - protein, 7 aa, synthetic construct
  REGION 1..7: note = Description of Artificial Sequence: Synthetic peptide
RVDNLPR

SEQ ID NO: 861 - protein, 7 aa, synthetic construct
  REGION 1..7: note = Description of Artificial Sequence: Synthetic peptide
RVDNLPR

SEQ ID NO: 862 - protein, 7 aa, synthetic construct
  REGION 1..7: note = Description of Artificial Sequence: Synthetic peptide
RQDNLGR

SEQ ID NO: 863 - protein, 7 aa, synthetic construct
  REGION 1..7: note = Description of Artificial Sequence: Synthetic peptide
RQDNLGR

SEQ ID NO: 864 - protein, 7 aa, synthetic construct
  REGION 1..7: note = Description of Artificial Sequence: Synthetic peptide
EAHHLSR

SEQ ID NO: 865 - protein, 7 aa, synthetic construct
  REGION 1..7: note = Description of Artificial Sequence: Synthetic peptide
EAHHLSR

SEQ ID NO: 866 - protein, 7 aa, synthetic construct
  REGION 1..7: note = Description of Artificial Sequence: Synthetic peptide
VDHHLRR

SEQ ID NO: 867 - protein, 7 aa, synthetic construct
  REGION 1..7: note = Description of Artificial Sequence: Synthetic peptide
VDHHLRR

SEQ ID NO: 868 - protein, 7 aa, synthetic construct
  REGION 1..7: note = Description of Artificial Sequence: Synthetic peptide
EAHHLSR

SEQ ID NO: 869 - protein, 7 aa, synthetic construct
  REGION 1..7: note = Description of Artificial Sequence: Synthetic peptide
EAHHLSR

SEQ ID NO: 870 - protein, 7 aa, synthetic construct
  REGION 1..7: note = Description of Artificial Sequence: Synthetic peptide
VDHHLRR

SEQ ID NO: 871 - protein, 7 aa, synthetic construct
  REGION 1..7: note = Description of Artificial Sequence: Synthetic peptide
VDHHLRR

SEQ ID NO: 872 - protein, 7 aa, synthetic construct
  REGION 1..7: note = Description of Artificial Sequence: Synthetic peptide
DPSNLRR

SEQ ID NO: 873 - protein, 7 aa, synthetic construct
  REGION 1..7: note = Description of Artificial Sequence: Synthetic peptide
DPSNLRR

SEQ ID NO: 874 - protein, 7 aa, synthetic construct
  REGION 1..7: note = Description of Artificial Sequence: Synthetic peptide
DSSVLRR

SEQ ID NO: 875 - protein, 7 aa, synthetic construct
  REGION 1..7: note = Description of Artificial Sequence: Synthetic peptide
DSSVLRR

SEQ ID NO: 876 - protein, 7 aa, synthetic construct
  REGION 1..7: note = Description of Artificial Sequence: Synthetic peptide
DPSNLRR

SEQ ID NO: 877 - protein, 7 aa, synthetic construct
  REGION 1..7: note = Description of Artificial Sequence: Synthetic peptide
DPSNLRR

SEQ ID NO: 878 - protein, 7 aa, synthetic construct
  REGION 1..7: note = Description of Artificial Sequence: Synthetic peptide
DSSVLRR

SEQ ID NO: 879 - protein, 7 aa, synthetic construct
  REGION 1..7: note = Description of Artificial Sequence: Synthetic peptide
DSSVLRR

SEQ ID NO: 880 - protein, 7 aa, synthetic construct
  REGION 1..7: note = Description of Artificial Sequence: Synthetic peptide
HKSSLTR

SEQ ID NO: 881 - protein, 7 aa, synthetic construct
  REGION 1..7: note = Description of Artificial Sequence: Synthetic peptide
HKSSLTR

SEQ ID NO: 882 - protein, 7 aa, synthetic construct
  REGION 1..7: note = Description of Artificial Sequence: Synthetic peptide
HKSSLTR

SEQ ID NO: 883 - protein, 7 aa, synthetic construct
  REGION 1..7: note = Description of Artificial Sequence: Synthetic peptide
HKSSLTR

SEQ ID NO: 884 - protein, 7 aa, synthetic construct
  REGION 1..7: note = Description of Artificial Sequence: Synthetic peptide
IPNKLAR

SEQ ID NO: 885 - protein, 7 aa, synthetic construct
  REGION 1..7: note = Description of Artificial Sequence: Synthetic peptide
EAHHLSR

SEQ ID NO: 886 - protein, 7 aa, synthetic construct
  REGION 1..7: note = Description of Artificial Sequence: Synthetic peptide
IPNKLAR

SEQ ID NO: 887 - protein, 7 aa, synthetic construct
  REGION 1..7: note = Description of Artificial Sequence: Synthetic peptide
EAHHLSR

SEQ ID NO: 888 - protein, 7 aa, synthetic construct
  REGION 1..7: note = Description of Artificial Sequence: Synthetic peptide
IPNKLAR

SEQ ID NO: 889 - protein, 7 aa, synthetic construct
  REGION 1..7: note = Description of Artificial Sequence: Synthetic peptide
EAHHLSR

SEQ ID NO: 890 - protein, 7 aa, synthetic construct
  REGION 1..7: note = Description of Artificial Sequence: Synthetic peptide
IPNKLAR

SEQ ID NO: 891 - protein, 7 aa, synthetic construct
  REGION 1..7: note = Description of Artificial Sequence: Synthetic peptide
EAHHLSR

SEQ ID NO: 892 - protein, 7 aa, synthetic construct
  REGION 1..7: note = Description of Artificial Sequence: Synthetic peptide
QSTTLKR

SEQ ID NO: 893 - protein, 7 aa, synthetic construct
  REGION 1..7: note = Description of Artificial Sequence: Synthetic peptide
QSTTLKR

SEQ ID NO: 894 - protein, 7 aa, synthetic construct
  REGION 1..7: note = Description of Artificial Sequence: Synthetic peptide
QSTTLKR

SEQ ID NO: 895 - protein, 7 aa, synthetic construct
  REGION 1..7: note = Description of Artificial Sequence: Synthetic peptide
QSTTLKR

SEQ ID NO: 896 - protein, 7 aa, synthetic construct
  REGION 1..7: note = Description of Artificial Sequence: Synthetic peptide
RQDNLGR

SEQ ID NO: 897 - protein, 7 aa, synthetic construct
  REGION 1..7: note = Description of Artificial Sequence: Synthetic peptide
LKEHLTR

SEQ ID NO: 898 - protein, 7 aa, synthetic construct
  REGION 1..7: note = Description of Artificial Sequence: Synthetic peptide
SPSKLVR

SEQ ID NO: 899 - protein, 7 aa, synthetic construct
  REGION 1..7: note = Description of Artificial Sequence: Synthetic peptide
LKEHLTR

SEQ ID NO: 900 - protein, 7 aa, synthetic construct
  REGION 1..7: note = Description of Artificial Sequence: Synthetic peptide
SPSKLVR

SEQ ID NO: 901 - protein, 7 aa, synthetic construct
  REGION 1..7: note = Description of Artificial Sequence: Synthetic peptide
LKEHLTR

SEQ ID NO: 902 - protein, 7 aa, synthetic construct
  REGION 1..7: note = Description of Artificial Sequence: Synthetic peptide
SPSKLVR

SEQ ID NO: 903 - protein, 7 aa, synthetic construct
  REGION 1..7: note = Description of Artificial Sequence: Synthetic peptide
LKEHLTR

SEQ ID NO: 904 - protein, 7 aa, synthetic construct
  REGION 1..7: note = Description of Artificial Sequence: Synthetic peptide
SPSKLVR

SEQ ID NO: 905 - protein, 7 aa, synthetic construct
  REGION 1..7: note = Description of Artificial Sequence: Synthetic peptide
RQSRLQR

SEQ ID NO: 906 - protein, 7 aa, synthetic construct
  REGION 1..7: note = Description of Artificial Sequence: Synthetic peptide
EAHHLSR

SEQ ID NO: 907 - protein, 7 aa, synthetic construct
  REGION 1..7: note = Description of Artificial Sequence: Synthetic peptide
RQSRLQR

SEQ ID NO: 908 - protein, 7 aa, synthetic construct
  REGION 1..7: note = Description of Artificial Sequence: Synthetic peptide
EAHHLSR

SEQ ID NO: 909 - protein, 7 aa, synthetic construct
  REGION 1..7: note = Description of Artificial Sequence: Synthetic peptide
RQSRLQR

SEQ ID NO: 910 - protein, 7 aa, synthetic construct
  REGION 1..7: note = Description of Artificial Sequence: Synthetic peptide
EAHHLSR

SEQ ID NO: 911 - protein, 7 aa, synthetic construct
  REGION 1..7: note = Description of Artificial Sequence: Synthetic peptide
RQSRLQR

SEQ ID NO: 912 - protein, 7 aa, synthetic construct
  REGION 1..7: note = Description of Artificial Sequence: Synthetic peptide
EAHHLSR

SEQ ID NO: 913 - protein, 7 aa, synthetic construct
  REGION 1..7: note = Description of Artificial Sequence: Synthetic peptide
QRSDLTR

SEQ ID NO: 914 - protein, 7 aa, synthetic construct
  REGION 1..7: note = Description of Artificial Sequence: Synthetic peptide
TKQILGR

SEQ ID NO: 915 - protein, 7 aa, synthetic construct
  REGION 1..7: note = Description of Artificial Sequence: Synthetic peptide
QRSDLTR

SEQ ID NO: 916 - protein, 7 aa, synthetic construct
  REGION 1..7: note = Description of Artificial Sequence: Synthetic peptide
TKQILGR

SEQ ID NO: 917 - protein, 7 aa, synthetic construct
  REGION 1..7: note = Description of Artificial Sequence: Synthetic peptide
QRSDLTR

SEQ ID NO: 918 - protein, 7 aa, synthetic construct
  REGION 1..7: note = Description of Artificial Sequence: Synthetic peptide
TKQILGR

SEQ ID NO: 919 - protein, 7 aa, synthetic construct
  REGION 1..7: note = Description of Artificial Sequence: Synthetic peptide
QRSDLTR

SEQ ID NO: 920 - protein, 7 aa, synthetic construct
  REGION 1..7: note = Description of Artificial Sequence: Synthetic peptide
TKQILGR

SEQ ID NO: 921 - protein, 7 aa, synthetic construct
  REGION 1..7: note = Description of Artificial Sequence: Synthetic peptide
RPESLAP

SEQ ID NO: 922 - protein, 7 aa, synthetic construct
  REGION 1..7: note = Description of Artificial Sequence: Synthetic peptide
RPESLAP

SEQ ID NO: 923 - protein, 7 aa, synthetic construct
  REGION 1..7: note = Description of Artificial Sequence: Synthetic peptide
RPESLAP

SEQ ID NO: 924 - protein, 7 aa, synthetic construct
  REGION 1..7: note = Description of Artificial Sequence: Synthetic peptide
RPESLAP

SEQ ID NO: 925 - protein, 7 aa, synthetic construct
  REGION 1..7: note = Description of Artificial Sequence: Synthetic peptide
RREVLEN

SEQ ID NO: 926 - protein, 7 aa, synthetic construct
  REGION 1..7: note = Description of Artificial Sequence: Synthetic peptide
RKDALHV

SEQ ID NO: 927 - protein, 7 aa, synthetic construct
  REGION 1..7: note = Description of Artificial Sequence: Synthetic peptide
RREVLEN

SEQ ID NO: 928 - protein, 7 aa, synthetic construct
  REGION 1..7: note = Description of Artificial Sequence: Synthetic peptide
RKDALHV

SEQ ID NO: 929 - protein, 7 aa, synthetic construct
  REGION 1..7: note = Description of Artificial Sequence: Synthetic peptide
RREVLEN

SEQ ID NO: 930 - protein, 7 aa, synthetic construct
  REGION 1..7: note = Description of Artificial Sequence: Synthetic peptide
RKDALHV

SEQ ID NO: 931 - protein, 7 aa, synthetic construct
  REGION 1..7: note = Description of Artificial Sequence: Synthetic peptide
RREVLEN

SEQ ID NO: 932 - protein, 7 aa, synthetic construct
  REGION 1..7: note = Description of Artificial Sequence: Synthetic peptide
RKDALHV

SEQ ID NO: 933 - protein, 7 aa, synthetic construct
  REGION 1..7: note = Description of Artificial Sequence: Synthetic peptide
RSDHLSL

SEQ ID NO: 934 - protein, 7 aa, synthetic construct
  REGION 1..7: note = Description of Artificial Sequence: Synthetic peptide
RSDHLSL

SEQ ID NO: 935 - protein, 7 aa, synthetic construct
  REGION 1..7: note = Description of Artificial Sequence: Synthetic peptide
RSDHLSL

SEQ ID NO: 936 - protein, 7 aa, synthetic construct
  REGION 1..7: note = Description of Artificial Sequence: Synthetic peptide
RSDHLSL

SEQ ID NO: 937 - protein, 7 aa, synthetic construct
  REGION 1..7: note = Description of Artificial Sequence: Synthetic peptide
KNHSLNN

SEQ ID NO: 938 - protein, 7 aa, synthetic construct
  REGION 1..7: note = Description of Artificial Sequence: Synthetic peptide
RVDNLPR

SEQ ID NO: 939 - protein, 7 aa, synthetic construct
  REGION 1..7: note = Description of Artificial Sequence: Synthetic peptide
RQDNLGR

SEQ ID NO: 940 - protein, 7 aa, synthetic construct
  REGION 1..7: note = Description of Artificial Sequence: Synthetic peptide
RVDNLPR

SEQ ID NO: 941 - protein, 7 aa, synthetic construct
  REGION 1..7: note = Description of Artificial Sequence: Synthetic peptide
RQDNLGR

SEQ ID NO: 942 - protein, 7 aa, synthetic construct
  REGION 1..7: note = Description of Artificial Sequence: Synthetic peptide
RVDNLPR

SEQ ID NO: 943 - protein, 7 aa, synthetic construct
  REGION 1..7: note = Description of Artificial Sequence: Synthetic peptide
RQDNLGR

SEQ ID NO: 944 - protein, 7 aa, synthetic construct
  REGION 1..7: note = Description of Artificial Sequence: Synthetic peptide
RVDNLPR

SEQ ID NO: 945 - protein, 7 aa, synthetic construct
  REGION 1..7: note = Description of Artificial Sequence: Synthetic peptide
RQDNLGR

SEQ ID NO: 946 - protein, 7 aa, synthetic construct
  REGION 1..7: note = Description of Artificial Sequence: Synthetic peptide
KGDHLRR

SEQ ID NO: 947 - protein, 7 aa, synthetic construct
  REGION 1..7: note = Description of Artificial Sequence: Synthetic peptide
DPSNLRR

SEQ ID NO: 948 - protein, 7 aa, synthetic construct
  REGION 1..7: note = Description of Artificial Sequence: Synthetic peptide
KGDHLRR

SEQ ID NO: 949 - protein, 7 aa, synthetic construct
  REGION 1..7: note = Description of Artificial Sequence: Synthetic peptide
DPSNLRR

SEQ ID NO: 950 - protein, 7 aa, synthetic construct
  REGION 1..7: note = Description of Artificial Sequence: Synthetic peptide
KGDHLRR

SEQ ID NO: 951 - protein, 7 aa, synthetic construct
  REGION 1..7: note = Description of Artificial Sequence: Synthetic peptide
DPSNLRR

SEQ ID NO: 952 - protein, 7 aa, synthetic construct
  REGION 1..7: note = Description of Artificial Sequence: Synthetic peptide
KGDHLRR

SEQ ID NO: 953 - protein, 7 aa, synthetic construct
  REGION 1..7: note = Description of Artificial Sequence: Synthetic peptide
DPSNLRR

SEQ ID NO: 954 - protein, 7 aa, synthetic construct
  REGION 1..7: note = Description of Artificial Sequence: Synthetic peptide
QGGTLRR

SEQ ID NO: 955 - protein, 7 aa, synthetic construct
  REGION 1..7: note = Description of Artificial Sequence: Synthetic peptide
QSTTLKR

SEQ ID NO: 956 - protein, 7 aa, synthetic construct
  REGION 1..7: note = Description of Artificial Sequence: Synthetic peptide
QGGTLRR

SEQ ID NO: 957 - protein, 7 aa, synthetic construct
  REGION 1..7: note = Description of Artificial Sequence: Synthetic peptide
QSTTLKR

SEQ ID NO: 958 - protein, 7 aa, synthetic construct
  REGION 1..7: note = Description of Artificial Sequence: Synthetic peptide
QGGTLRR

SEQ ID NO: 959 - protein, 7 aa, synthetic construct
  REGION 1..7: note = Description of Artificial Sequence: Synthetic peptide
QSTTLKR

SEQ ID NO: 960 - protein, 7 aa, synthetic construct
  REGION 1..7: note = Description of Artificial Sequence: Synthetic peptide
QGGTLRR

SEQ ID NO: 961 - protein, 7 aa, synthetic construct
  REGION 1..7: note = Description of Artificial Sequence: Synthetic peptide
QSTTLKR

SEQ ID NO: 962 - DNA, 20 bp, synthetic construct
  misc_feature 1..20: note = Description of Artificial Sequence: Synthetic oligonucleotide
  source 1..20: mol_type = other DNA
gcctaccgcaggatgttcgg

SEQ ID NO: 963 - DNA, 20 bp, synthetic construct
  misc_feature 1..20: note = Description of Artificial Sequence: Synthetic oligonucleotide
  source 1..20: mol_type = other DNA
ggcccggggacgaggcgtag

SEQ ID NO: 964 - DNA, 20 bp, synthetic construct
  misc_feature 1..20: note = Description of Artificial Sequence: Synthetic oligonucleotide
  source 1..20: mol_type = other DNA
gcgcacggcagaggagcgcg

SEQ ID NO: 965 - DNA, 20 bp, synthetic construct
  misc_feature 1..20: note = Description of Artificial Sequence: Synthetic oligonucleotide
  source 1..20: mol_type = other DNA
gccctcgttcgcctcttctc

SEQ ID NO: 966 - DNA, 93 bp, synthetic construct
  misc_feature 1..93: note = Description of Artificial Sequence: Synthetic oligonucleotide
  source 1..93: mol_type = other DNA
gtttaagagctaagctggaaacagcatagcaagtttaaataaggctagtccgttatcaacttgaaaaagtggcaccgagtcggtgcttttttt

SEQ ID NO: 967 - DNA, 93 bp, synthetic construct; identical to SEQ ID NO: 966
  misc_feature 1..93: note = Description of Artificial Sequence: Synthetic oligonucleotide
  source 1..93: mol_type = other DNA

SEQ ID NO: 968 - DNA, 93 bp, synthetic construct; identical to SEQ ID NO: 966
  misc_feature 1..93: note = Description of Artificial Sequence: Synthetic oligonucleotide
  source 1..93: mol_type = other DNA

SEQ ID NO: 969 - DNA, 93 bp, synthetic construct; identical to SEQ ID NO: 966
  misc_feature 1..93: note = Description of Artificial Sequence: Synthetic oligonucleotide
  source 1..93: mol_type = other DNA

SEQ ID NO: 970 - DNA, 20 bp, synthetic construct
  misc_feature 1..20: note = Description of Artificial Sequence: Synthetic oligonucleotide
  source 1..20: mol_type = other DNA
gtgtccagggacaatgagca

SEQ ID NO: 971 - DNA, 20 bp, synthetic construct
  misc_feature 1..20: note = Description of Artificial Sequence: Synthetic oligonucleotide
  source 1..20: mol_type = other DNA
gcggcccggagcctacgagg

SEQ ID NO: 972 - DNA, 21 bp, synthetic construct
  misc_feature 1..21: note = Description of Artificial Sequence: Synthetic oligonucleotide
  source 1..21: mol_type = other DNA
gcggcggcggcagcagctgcg

SEQ ID NO: 973 - DNA, 20 bp, synthetic construct
  misc_feature 1..20: note = Description of Artificial Sequence: Synthetic oligonucleotide
  source 1..20: mol_type = other DNA
gccggactcggacgcgtggt

SEQ ID NO: 974 - DNA, 93 bp, synthetic construct; identical to SEQ ID NO: 966
  misc_feature 1..93: note = Description of Artificial Sequence: Synthetic oligonucleotide
  source 1..93: mol_type = other DNA

SEQ ID NO: 975 - DNA, 93 bp, synthetic construct; identical to SEQ ID NO: 966
  misc_feature 1..93: note = Description of Artificial Sequence: Synthetic oligonucleotide
  source 1..93: mol_type = other DNA

SEQ ID NO: 976 - DNA, 93 bp, synthetic construct; identical to SEQ ID NO: 966
  misc_feature 1..93: note = Description of Artificial Sequence: Synthetic oligonucleotide
  source 1..93: mol_type = other DNA

SEQ ID NO: 977 - DNA, 93 bp, synthetic construct; identical to SEQ ID NO: 966
  misc_feature 1..93: note = Description of Artificial Sequence: Synthetic oligonucleotide
  source 1..93: mol_type = other DNA

SEQ ID NO: 978 - protein, 850 aa, synthetic construct
  REGION 1..850: note = Description of Artificial Sequence: Synthetic polypeptide
MAPKKKRKMNHDQEFDPPKVYPPVPAEKRKPIRVLSLFDGIATGLLVLKDLGIQVDRYIASEVCEDSITVGMVRHQGKIMYVGDVRSVTQKHIQEWGPFDLVIGGSPCNDLSIVNPARKGLYEGTGRLFFEFYRLLHDARPKEGDDRPFFWLFENVVAMGVSDKRDISRFLESNPVMIDAKEVSAAHRARYFWGNLPGMNRPLASTVNDKLELQECLEHGRIAKFSKVRTITTRSNSIKQGKDQHFPVFMNEKEDILWCTEMERVFGFPVHYTDVSNMSRLARQRLLGRSWSVPVIRHLFAPLKEYFACVSSGNSNANSRGPSFSSGLVPLSLRGSHMGPMEIYKTVSAWKRQPVRVLSLFRNIDKVLKSLGFLESGSGSGGGTLKYVEDVTNVVRRDVEKWGPFDLVYGSTQPLGSSCDRCPGWYMFQFHRILQYALPRQESQRPFFWIFMDNLLLTEDDQETTTRFLQTEAVTLQDVRGRDYQNAMRVWSNIPGLKSKHAPLTPKEEEYLQAQVRSRSKLDAPKVDLLVKNCLLPLREYFKYFSQNSLPLSGGGGSGGGGSVGIHGVPSRPGERPFQCRICMRNFSHKSSLTRHTRTHTGEKPFQCRICMRNFSRTEHLARHLRTHTGSQKPFQCRICMRNFSQSAHLKRHTRTHTGEKPFQCRICMRNFSRTEHLARHLRTHTGGGGSQKPFQCRICMRNFSHKSSLTRHTRTHTGEKPFQCRICMRNFSRPESLAPHLRTHLRGSGGGSMDAKSLTAWSRTLVTFKDVFVDFTREEWKLLDTAQQIVYRNVMLENYKNLVSLGYQLTKPDVILRLEKGEEPWLVEREIHQETHPDSETAFEIKSSV

SEQ ID NO: 979 - protein, 2125 aa, synthetic construct
  REGION 1..2125: note = Description of Artificial Sequence: Synthetic polypeptide
MNHDQEFDPPKVYPPVPAEKRKPIRVLSLFDGIATGLLVLKDLGIQVDRYIASEVCEDSITVGMVRHQGKIMYVGDVRSVTQKHIQEWGPFDLVIGGSPCNDLSIVNPARKGLYEGTGRLFFEFYRLLHDARPKEGDDRPFFWLFENVVAMGVSDKRDISRFLESNPVMIDAKEVSAAHRARYFWGNLPGMNRPLASTVNDKLELQECLEHGRIAKFSKVRTITTRSNSIKQGKDQHFPVFMNEKEDILWCTEMERVFGFPVHYTDVSNMSRLARQRLLGRSWSVPVIRHLFAPLKEYFACVSSGNSNANSRGPSFSSGLVPLSLRGSHMGPMEIYKTVSAWKRQPVRVLSLFRNIDKVLKSLGFLESGSGSGGGTLKYVEDVTNVVRRDVEKWGPFDLVYGSTQPLGSSCDRCPGWYMFQFHRILQYALPRQESQRPFFWIFMDNLLLTEDDQETTTRFLQTEAVTLQDVRGRDYQNAMRVWSNIPGLKSKHAPLTPKEEEYLQAQVRSRSKLDAPKVDLLVKNCLLPLREYFKYFSQNSLPLGGPSSGAPPPSGGSPAGSPTSTEEGTSESATPESGPGTSTEPSEGSAPGSPAGSPTSTEEGTSTEPSEGSAPGTSTEPSEPKKKRKVYMDKKYSIGLAIGTNSVGWAVITDEYKVPSKKFKVLGNTDRHSIKKNLIGALLFDSGETAEATRLKRTARRRYTRRKNRICYLQEIFSNEMAKVDDSFFHRLEESFLVEEDKKHERHPIFGNIVDEVAYHEKYPTIYHLRKKLVDSTDKADLRLIYLALAHMIKFRGHFLIEGDLNPDNSDVDKLFIQLVQTYNQLFEENPINASGVDAKAILSARLSKSRRLENLIAQLPGEKKNGLFGNLIALSLGLTPNFKSNFDLAEDAKLQLSKDTYDDDLDNLLAQIGDQYADLFLAAKNLSDAILLSDILRVNTEITKAPLSASMIKRYDEHHQDLTLLKALVRQQLPEKYKEIFFDQSKNGYAGYIDGGASQEEFYKFIKPILEKMDGTEELLVKLNREDLLRKQRTFDNGSIPHQIHLGELHAILRRQEDFYPFLKDNREKIEKILTFRIPYYVGPLARGNSRFAWMTRKSEETITPWNFEEVVDKGASAQSFIERMTNFDKNLPNEKVLPKHSLLYEYFTVYNELTKVKYVTEGMRKPAFLSGEQKKAIVDLLFKTNRKVTVKQLKEDYFKKIECFDSVEISGVEDRFNASLGTYHDLLKIIKDKDFLDNEENEDILEDIVLTLTLFEDREMIEERLKTYAHLFDDKVMKQLKRRRYTGWGRLSRKLINGIRDKQSGKTILDFLKSDGFANRNFMQLIHDDSLTFKEDIQKAQVSGQGDSLHEHIANLAGSPAIKKGILQTVKVVDELVKVMGRHKPENIVIEMARENQTTQKGQKNSRERMKRIEEGIKELGSQILKEHPVENTQLQNEKLYLYYLQNGRDMYVDQELDINRLSDYDVDAIVPQSFLKDDSIDNKVLTRSDKNRGKSDNVPSEEVVKKMKNYWRQLLNAKLITQRKFDNLTKAERGGLSELDKAGFIKRQLVETRQITKHVAQILDSRMNTKYDENDKLIREVKVITLKSKLVSDFRKDFQFYKVREINNYHHAHDAYLNAVVGTALIKKYPKLESEFVYGDYKVYDVRKMIAKSEQEIGKATAKYFFYSNIMNFFKTEITLANGEIRKRPLIETNGETGEIVWDKGRDFATVRKVLSMPQVNIVKKTEVQTGGFSKESILPKRNSDKLIARKKDWDPKKYGGFDSPTVAYSVLVVAKVEKGKSKKLKSVKELLGITIMERSSFEKNPIDFLEAKGYKEVKKDLIIKLPKYSLFELENGRKRMLASAGELQKGNELALPSKYVNFLYLASHYEKLKGSPEDNEQKQLFVEQHKHYLDEIIEQISEFSKRVILADANLDKVLSAYNKHRDKPIREQAENIIHLFTLTNLGAPAAFKYFDTTIDRKRYTSTKEVLDATLIHQSITGLYETRIDLSQLGGDPKKKRKVSGSETPGTSESATPESTGMNNSQGRVTFEDVTVNFTQGEWQRLNPEQRNLYRDVMLENYSNLVSVGQGETTKPDVILRLEQGKEPWLEEEEVLGSGRAEKNGDIGGQIWKPKDVKESL

SEQ ID NO: 980 - protein, 2210 aa, synthetic construct
  REGION 1..2210: note = Description of Artificial Sequence: Synthetic polypeptide
MNHDQEFDPPKVYPPVPAEKRKPIRVLSLFDGIATGLLVLKDLGIQVDRYIASEVCEDSITVGMVRHQGKIMYVGDVRSVTQKHIQEWGPFDLVIGGSPCNDLSIVNPARKGLYEGTGRLFFEFYRLLHDARPKEGDDRPFFWLFENVVAMGVSDKRDISRFLESNPVMIDAKEVSAAHRARYFWGNLPGMNRPLASTVNDKLELQECLEHGRIAKFSKVRTITTRSNSIKQGKDQHFPVFMNEKEDILWCTEMERVFGFPVHYTDVSNMSRLARQRLLGRSWSVPVIRHLFAPLKEYFACVSSGNSNANSRGPSFSSGLVPLSLRGSHMGPMEIYKTVSAWKRQPVRVLSLFRNIDKVLKSLGFLESGSGSGGGTLKYVEDVTNVVRRDVEKWGPFDLVYGSTQPLGSSCDRCPGWYMFQFHRILQYALPRQESQRPFFWIFMDNLLLTEDDQETTTRFLQTEAVTLQDVRGRDYQNAMRVWSNIPGLKSKHAPLTPKEEEYLQAQVRSRSKLDAPKVDLLVKNCLLPLREYFKYFSQNSLPLGGPSSGAPPPSGGSPAGSPTSTEEGTSESATPESGPGTSTEPSEGSAPGSPAGSPTSTEEGTSTEPSEGSAPGTSTEPSEPKKKRKVYMDKKYSIGLAIGTNSVGWAVITDEYKVPSKKFKVLGNTDRHSIKKNLIGALLFDSGETAEATRLKRTARRRYTRRKNRICYLQEIFSNEMAKVDDSFFHRLEESFLVEEDKKHERHPIFGNIVDEVAYHEKYPTIYHLRKKLVDSTDKADLRLIYLALAHMIKFRGHFLIEGDLNPDNSDVDKLFIQLVQTYNQLFEENPINASGVDAKAILSARLSKSRRLENLIAQLPGEKKNGLFGNLIALSLGLTPNFKSNFDLAEDAKLQLSKDTYDDDLDNLLAQIGDQYADLFLAAKNLSDAILLSDILRVNTEITKAPLSASMIKRYDEHHQDLTLLKALVRQQLPEKYKEIFFDQSKNGYAGYIDGGASQEEFYKFIKPILEKMDGTEELLVKLNREDLLRKQRTFDNGSIPHQIHLGELHAILRRQEDFYPFLKDNREKIEKILTFRIPYYVGPLARGNSRFAWMTRKSEETITPWNFEEVVDKGASAQSFIERMTNFDKNLPNEKVLPKHSLLYEYFTVYNELTKVKYVTEGMRKPAFLSGEQKKAIVDLLFKTNRKVTVKQLKEDYFKKIECFDSVEISGVEDRFNASLGTYHDLLKIIKDKDFLDNEENEDILEDIVLTLTLFEDREMIEERLKTYAHLFDDKVMKQLKRRRYTGWGRLSRKLINGIRDKQSGKTILDFLKSDGFANRNFMQLIHDDSLTFKEDIQKAQVSGQGDSLHEHIANLAGSPAIKKGILQTVKVVDELVKVMGRHKPENIVIEMARENQTTQKGQKNSRERMKRIEEGIKELGSQILKEHPVENTQLQNEKLYLYYLQNGRDMYVDQELDINRLSDYDVDAIVPQSFLKDDSIDNKVLTRSDKNRGKSDNVPSEEVVKKMKNYWRQLLNAKLITQRKFDNLTKAERGGLSELDKAGFIKRQLVETRQITKHVAQILDSRMNTKYDENDKLIREVKVITLKSKLVSDFRKDFQFYKVREINNYHHAHDAYLNAVVGTALIKKYPKLESEFVYGDYKVYDVRKMIAKSEQEIGKATAKYFFYSNIMNFFKTEITLANGEIRKRPLIETNGETGEIVWDKGRDFATVRKVLSMPQVNIVKKTEVQTGGFSKESILPKRNSDKLIARKKDWDPKKYGGFDSPTVAYSVLVVAKVEKGKSKKLKSVKELLGITIMERSSFEKNPIDFLEAKGYKEVKKDLIIKLPKYSLFELENGRKRMLASAGELQKGNELALPSKYVNFLYLASHYEKLKGSPEDNEQKQLFVEQHKHYLDEIIEQISEFSKRVILADANLDKVLSAYNKHRDKPIREQAENIIHLFTLTNLGAPAAFKYFDTTIDRKRYTSTKEVLDATLIHQSITGLYETRIDLSQLGGDPKKKRKVSGSETPGTSESATPESTGMGKKQNKKKVEEVLEEEEEEYVVEKVLDRRVVKGKVEYLLKWKGFSDEDNTWEPEENLDCPDLIAEFLQSQKTAHETDKSEGGKRKADSDSEDKGEESKPKKKKEESEKPRGFARGLEPERIIGATDSSGELMFLMKWKNSDEADLVPAKEANVKCPQVVISFYEERLTWHSYPSEDDDKKDDKN

SEQ ID NO: 981 - protein, 2105 aa, synthetic construct
  REGION 1..2105: note = Description of Artificial Sequence: Synthetic polypeptide
MNHDQEFDPPKVYPPVPAEKRKPIRVLSLFDGIATGLLVLKDLGIQVDRYIASEVCEDSITVGMVRHQGKIMYVGDVRSVTQKHIQEWGPFDLVIGGSPCNDLSIVNPARKGLYEGTGRLFFEFYRLLHDARPKEGDDRPFFWLFENVVAMGVSDKRDISRFLESNPVMIDAKEVSAAHRARYFWGNLPGMNRPLASTVNDKLELQECLEHGRIAKFSKVRTITTRSNSIKQGKDQHFPVFMNEKEDILWCTEMERVFGFPVHYTDVSNMSRLARQRLLGRSWSVPVIRHLFAPLKEYFACVSSGNSNANSRGPSFSSGLVPLSLRGSHMGPMEIYKTVSAWKRQPVRVLSLFRNIDKVLKSLGFLESGSGSGGGTLKYVEDVTNVVRRDVEKWGPFDLVYGSTQPLGSSCDRCPGWYMFQFHRILQYALPRQESQRPFFWIFMDNLLLTEDDQETTTRFLQTEAVTLQDVRGRDYQNAMRVWSNIPGLKSKHAPLTPKEEEYLQAQVRSRSKLDAPKVDLLVKNCLLPLREYFKYFSQNSLPLGGPSSGAPPPSGGSPAGSPTSTEEGTSESATPESGPGTSTEPSEGSAPGSPAGSPTSTEEGTSTEPSEGSAPGTSTEPSEPKKKRKVYMDKKYSIGLAIGTNSVGWAVITDEYKVPSKKFKVLGNTDRHSIKKNLIGALLFDSGETAEATRLKRTARRRYTRRKNRICYLQEIFSNEMAKVDDSFFHRLEESFLVEEDKKHERHPIFGNIVDEVAYHEKYPTIYHLRKKLVDSTDKADLRLIYLALAHMIKFRGHFLIEGDLNPDNSDVDKLFIQLVQTYNQLFEENPINASGVDAKAILSARLSKSRRLENLIAQLPGEKKNGLFGNLIALSLGLTPNFKSNFDLAEDAKLQLSKDTYDDDLDNLLAQIGDQYADLFLAAKNLSDAILLSDILRVNTEITKAPLSASMIKRYDEHHQDLTLLKALVRQQLPEKYKEIFFDQSKNGYAGYIDGGASQEEFYKFIKPILEKMDGTEELLVKLNREDLLRKQRTFDNGSIPHQIHLGELHAILRRQEDFYPFLKDNREKIEKILTFRIPYYVGPLARGNSRFAWMTRKSEETITPWNFEEVVDKGASAQSFIERMTNFDKNLPNEKVLPKHSLLYEYFTVYNELTKVKYVTEGMRKPAFLSGEQKKAIVDLLFKTNRKVTVKQLKEDYFKKIECFDSVEISGVEDRFNASLGTYHDLLKIIKDKDFLDNEENEDILEDIVLTLTLFEDREMIEERLKTYAHLFDDKVMKQLKRRRYTGWGRLSRKLINGIRDKQSGKTILDFLKSDGFANRNFMQLIHDDSLTFKEDIQKAQVSGQGDSLHEHIANLAGSPAIKKGILQTVKVVDELVKVMGRHKPENIVIEMARENQTTQKGQKNSRERMKRIEEGIKELGSQILKEHPVENTQLQNEKLYLYYLQNGRDMYVDQELDINRLSDYDVDAIVPQSFLKDDSIDNKVLTRSDKNRGKSDNVPSEEVVKKMKNYWRQLLNAKLITQRKFDNLTKAERGGLSELDKAGFIKRQLVETRQITKHVAQILDSRMNTKYDENDKLIREVKVITLKSKLVSDFRKDFQFYKVREINNYHHAHDAYLNAVVGTALIKKYPKLESEFVYGDYKVYDVRKMIAKSEQEIGKATAKYFFYSNIMNFFKTEITLANGEIRKRPLIETNGETGEIVWDKGRDFATVRKVLSMPQVNIVKKTEVQTGGFSKESILPKRNSDKLIARKKDWDPKKYGGFDSPTVAYSVLVVAKVEKGKSKKLKSVKELLGITIMERSSFEKNPIDFLEAKGYKEVKKDLIIKLPKYSLFELENGRKRMLASAGELQKGNELALPSKYVNFLYLASHYEKLKGSPEDNEQKQLFVEQHKHYLDEIIEQISEFSKRVILADANLDKVLSAYNKHRDKPIREQAENIIHLFTLTNLGAPAAFKYFDTTIDRKRYTSTKEVLDATLIHQSITGLYETRIDLSQLGGDPKKKRKVSGSETPGTSESATPESTGPSEANSIQSANATTKTSETNHTSRPRLKNVDRSTAQQLAVTVGNVTVIITDFKEKTRSSSTSSSTVTSSAGSEQQNQSSS

SEQ ID NO: 982 - protein, 2105 aa, synthetic construct
  REGION 1..2105: note = Description of Artificial Sequence: Synthetic polypeptide
MNHDQEFDPPKVYPPVPAEKRKPIRVLSLFDGIATGLLVLKDLGIQVDRYIASEVCEDSITVGMVRHQGKIMYVGDVRSVTQKHIQEWGPFDLVIGGSPCNDLSIVNPARKGLYEGTGRLFFEFYRLLHDARPKEGDDRPFFWLFENVVAMGVSDKRDISRFLESNPVMIDAKEVSAAHRARYFWGNLPGMNRPLASTVNDKLELQECLEHGRIAKFSKVRTITTRSNSIKQGKDQHFPVFMNEKEDILWCTEMERVFGFPVHYTDVSNMSRLARQRLLGRSWSVPVIRHLFAPLKEYFACVSSGNSNANSRGPSFSSGLVPLSLRGSHMGPMEIYKTVSAWKRQPVRVLSLFRNIDKVLKSLGFLESGSGSGGGTLKYVEDVTNVVRRDVEKWGPFDLVYGSTQPLGSSCDRCPGWYMFQFHRILQYALPRQESQRPFFWIFMDNLLLTEDDQETTTRFLQTEAVTLQDVRGRDYQNAMRVWSNIPGLKSKHAPLTPKEEEYLQAQVRSRSKLDAPKVDLLVKNCLLPLREYFKYFSQNSLPLGGPSSGAPPPSGGSPAGSPTSTEEGTSESATPESGPGTSTEPSEGSAPGSPAGSPTSTEEGTSTEPSEGSAPGTSTEPSEPKKKRKVYMDKKYSIGLAIGTNSVGWAVITDEYKVPSKKFKVLGNTDRHSIKKNLIGALLFDSGETAEATRLKRTARRRYTRRKNRICYLQEIFSNEMAKVDDSFFHRLEESFLVEEDKKHERHPIFGNIVDEVAYHEKYPTIYHLRKKLVDSTDKADLRLIYLALAHMIKFRGHFLIEGDLNPDNSDVDKLFIQLVQTYNQLFEENPINASGVDAKAILSARLSKSRRLENLIAQLPGEKKNGLFGNLIALSLGLTPNFKSNFDLAEDAKLQLSKDTYDDDLDNLLAQIGDQYADLFLAAKNLSDAILLSDILRVNTEITKAPLSASMIKRYDEHHQDLTLLKALVRQQLPEKYKEIFFDQSKNGYAGYIDGGASQEEFYKFIKPILEKMDGTEELLVKLNREDLLRKQRTFDNGSIPHQIHLGELHAILRRQEDFYPFLKDNREKIEKILTFRIPYYVGPLARGNSRFAWMTRKSEETITPWNFEEVVDKGASAQSFIERMTNFDKNLPNEKVLPKHSLLYEYFTVYNELTKVKYVTEGMRKPAFLSGEQKKAIVDLLFKTNRKVTVKQLKEDYFKKIECFDSVEISGVEDRFNASLGTYHDLLKIIKDKDFLDNEENEDILEDIVLTLTLFEDREMIEERLKTYAHLFDDKVMKQLKRRRYTGWGRLSRKLINGIRDKQSGKTILDFLKSDGFANRNFMQLIHDDSLTFKEDIQKAQVSGQGDSLHEHIANLAGSPAIKKGILQTVKVVDELVKVMGRHKPENIVIEMARENQTTQKGQKNSRERMKRIEEGIKELGSQILKEHPVENTQLQNEKLYLYYLQNGRDMYVDQELDINRLSDYDVDAIVPQSFLKDDSIDNKVLTRSDKNRGKSDNVPSEEVVKKMKNYWRQLLNAKLITQRKFDNLTKAERGGLSELDKAGFIKRQLVETRQITKHVAQILDSRMNTKYDENDKLIREVKVITLKSKLVSDFRKDFQFYKVREINNYHHAHDAYLNAVVGTALIKKYPKLESEFVYGDYKVYDVRKMIAKSEQEIGKATAKYFFYSNIMNFFKTEITLANGEIRKRPLIETNGETGEIVWDKGRDFATVRKVLSMPQVNIVKKTEVQTGGFSKESILPKRNSDKLIARKKDWDPKKYGGFDSPTVAYSVLVVAKVEKGKSKKLKSVKELLGITIMERSSFEKNPIDFLEAKGYKEVKKDLIIKLPKYSLFELENGRKRMLASAGELQKGNELALPSKYVNFLYLASHYEKLKGSPEDNEQKQLFVEQHKHYLDEIIEQISEFSKRVILADANLDKVLSAYNKHRDKPIREQAENIIHLFTLTNLGAPAAFKYFDTTIDRKRYTSTKEVLDATLIHQSITGLYETRIDLSQLGGDPKKKRKVSGSETPGTSESATPESTGNKKLEAVGTGIEPKAMSQGLVTFGDVAVDFSQEEWEWLNPIQRNLYRKVMLENYRNLASLGLCVSKPDVISSLEQGKEPW

SEQ ID NO: 983 - protein, 2105 aa, synthetic construct
  REGION 1..2105: note = Description of Artificial Sequence: Synthetic polypeptide
MNHDQEFDPPKVYPPVPAEKRKPIRVLSLFDGIATGLLVLKDLGIQVDRYIASEVCEDSITVGMVRHQGKIMYVGDVRSVTQKHIQEWGPFDLVIGGSPCNDLSIVNPARKGLYEGTGRLFFEFYRLLHDARPKEGDDRPFFWLFENVVAMGVSDKRDISRFLESNPVMIDAKEVSAAHRARYFWGNLPGMNRPLASTVNDKLELQECLEHGRIAKFSKVRTITTRSNSIKQGKDQHFPVFMNEKEDILWCTEMERVFGFPVHYTDVSNMSRLARQRLLGRSWSVPVIRHLFAPLKEYFACVSSGNSNANSRGPSFSSGLVPLSLRGSHMGPMEIYKTVSAWKRQPVRVLSLFRNIDKVLKSLGFLESGSGSGGGTLKYVEDVTNVVRRDVEKWGPFDLVYGSTQPLGSSCDRCPGWYMFQFHRILQYALPRQESQRPFFWIFMDNLLLTEDDQETTTRFLQTEAVTLQDVRGRDYQNAMRVWSNIPGLKSKHAPLTPKEEEYLQAQVRSRSKLDAPKVDLLVKNCLLPLREYFKYFSQNSLPLGGPSSGAPPPSGGSPAGSPTSTEEGTSESATPESGPGTSTEPSEGSAPGSPAGSPTSTEEGTSTEPSEGSAPGTSTEPSEPKKKRKVYMDKKYSIGLAIGTNSVGWAVITDEYKVPSKKFKVLGNTDRHSIKKNLIGALLFDSGETAEATRLKRTARRRYTRRKNRICYLQEIFSNEMAKVDDSFFHRLEESFLVEEDKKHERHPIFGNIVDEVAYHEKYPTIYHLRKKLVDSTDKADLRLIYLALAHMIKFRGHFLIEGDLNPDNSDVDKLFIQLVQTYNQLFEENPINASGVDAKAILSARLSKSRRLENLIAQLPGEKKNGLFGNLIALSLGLTPNFKSNFDLAEDAKLQLSKDTYDDDLDNLLAQIGDQYADLFLAAKNLSDAILLSDILRVNTEITKAPLSASMIKRYDEHHQDLTLLKALVRQQLPEKYKEIFFDQSKNGYAGYIDGGASQEEFYKFIKPILEKMDGTEELLVKLNREDLLRKQRTFDNGSIPHQIHLGELHAILRRQEDFYPFLKDNREKIEKILTFRIPYYVGPLARGNSRFAWMTRKSEETITPWNFEEVVDKGASAQSFIERMTNFDKNLPNEKVLPKHSLLYEYFTVYNELTKVKYVTEGMRKPAFLSGEQKKAIVDLLFKTNRKVTVKQLKEDYFKKIECFDSVEISGVEDRFNASLGTYHDLLKIIKDKDFLDNEENEDILEDIVLTLTLFEDREMIEERLKTYAHLFDDKVMKQLKRRRYTGWGRLSRKLINGIRDKQSGKTILDFLKSDGFANRNFMQLIHDDSLTFKEDIQKAQVSGQGDSLHEHIANLAGSPAIKKGILQTVKVVDELVKVMGRHKPENIVIEMARENQTTQKGQKNSRERMKRIEEGIKELGSQILKEHPVENTQLQNEKLYLYYLQNGRDMYVDQELDINRLSDYDVDAIVPQSFLKDDSIDNKVLTRSDKNRGKSDNVPSEEVVKKMKNYWRQLLNAKLITQRKFDNLTKAERGGLSELDKAGFIKRQLVETRQITKHVAQILDSRMNTKYDENDKLIREVKVITLKSKLVSDFRKDFQFYKVREINNYHHAHDAYLNAVVGTALIKKYPKLESEFVYGDYKVYDVRKMIAKSEQEIGKATAKYFFYSNIMNFFKTEITLANGEIRKRPLIETNGETGEIVWDKGRDFATVRKVLSMPQVNIVKKTEVQTGGFSKESILPKRNSDKLIARKKDWDPKKYGGFDSPTVAYSVLVVAKVEKGKSKKLKSVKELLGITIMERSSFEKNPIDFLEAKGYKEVKKDLIIKLPKYSLFELENGRKRMLASAGELQKGNELALPSKYVNFLYLASHYEKLKGSPEDNEQKQLFVEQHKHYLDEIIEQISEFSKRVILADANLDKVLSAYNKHRDKPIREQAENIIHLFTLTNLGAPAAFKYFDTTIDRKRYTSTKEVLDATLIHQSITGLYETRIDLSQLGGDPKKKRKVSGSETPGTSESATPESTGDSVAFEDVAVNFTLEEWALLDPSQKNLYRDVMRETFRNLASVGKQWEDQNIEDPFKIPRRNISHIPERLCESKEGGQGEE

SEQ ID NO: 984 - protein, 2105 aa, synthetic construct
  REGION 1..2105: note = Description of Artificial Sequence: Synthetic polypeptide
MNHDQEFDPPKVYPPVPAEKRKPIRVLSLFDGIATGLLVLKDLGIQVDRYIASEVCEDSITVGMVRHQGKIMYVGDVRSVTQKHIQEWGPFDLVIGGSPCNDLSIVNPARKGLYEGTGRLFFEFYRLLHDARPKEGDDRPFFWLFENVVAMGVSDKRDISRFLESNPVMIDAKEVSAAHRARYFWGNLPGMNRPLASTVNDKLELQECLEHGRIAKFSKVRTITTRSNSIKQGKDQHFPVFMNEKEDILWCTEMERVFGFPVHYTDVSNMSRLARQRLLGRSWSVPVIRHLFAPLKEYFACVSSGNSNANSRGPSFSSGLVPLSLRGSHMGPMEIYKTVSAWKRQPVRVLSLFRNIDKVLKSLGFLESGSGSGGGTLKYVEDVTNVVRRDVEKWGPFDLVYGSTQPLGSSCDRCPGWYMFQFHRILQYALPRQESQRPFFWIFMDNLLLTEDDQETTTRFLQTEAVTLQDVRGRDYQNAMRVWSNIPGLKSKHAPLTPKEEEYLQAQVRSRSKLDAPKVDLLVKNCLLPLREYFKYFSQNSLPLGGPSSGAPPPSGGSPAGSPTSTEEGTSESATPESGPGTSTEPSEGSAPGSPAGSPTSTEEGTSTEPSEGSAPGTSTEPSEPKKKRKVYMDKKYSIGLAIGTNSVGWAVITDEYKVPSKKFKVLGNTDRHSIKKNLIGALLFDSGETAEATRLKRTARRRYTRRKNRICYLQEIFSNEMAKVDDSFFHRLEESFLVEEDKKHERHPIFGNIVDEVAYHEKYPTIYHLRKKLVDSTDKADLRLIYLALAHMIKFRGHFLIEGDLNPDNSDVDKLFIQLVQTYNQLFEENPINASGVDAKAILSARLSKSRRLENLIAQLPGEKKNGLFGNLIALSLGLTPNFKSNFDLAEDAKLQLSKDTYDDDLDNLLAQIGDQYADLFLAAKNLSDAILLSDILRVNTEITKAPLSASMIKRYDEHHQDLTLLKALVRQQLPEKYKEIFFDQSKNGYAGYIDGGASQEEFYKFIKPILEKMDGTEELLVKLNREDLLRKQRTFDNGSIPHQIHLGELHAILRRQEDFYPFLKDNREKIEKILTFRIPYYVGPLARGNSRFAWMTRKSEETITPWNFEEVVDKGASAQSFIERMTNFDKNLPNEKVLPKHSLLYEYFTVYNELTKVKYVTEGMRKPAFLSGEQKKAIVDLLFKTNRKVTVKQLKEDYFKKIECFDSVEISGVEDRFNASLGTYHDLLKIIKDKDFLDNEENEDILEDIVLTLTLFEDREMIEERLKTYAHLFDDKVMKQLKRRRYTGWGRLSRKLINGIRDKQSGKTILDFLKSDGFANRNFMQLIHDDSLTFKEDIQKAQVSGQGDSLHEHIANLAGSPAIKKGILQTVKVVDELVKVMGRHKPENIVIEMARENQTTQKGQKNSRERMKRIEEGIKELGSQILKEHPVENTQLQNEKLYLYYLQNGRDMYVDQELDINRLSDYDVDAIVPQSFLKDDSIDNKVLTRSDKNRGKSDNVPSEEVVKKMKNYWRQLLNAKLITQRKFDNLTKAERGGLSELDKAGFIKRQLVETRQITKHVAQILDSRMNTKYDENDKLIREVKVITLKSKLVSDFRKDFQFYKVREINNYHHAHDAYLNAVVGTALIKKYPKLESEFVYGDYKVYDVRKMIAKSEQEIGKATAKYFFYSNIMNFFKTEITLANGEIRKRPLIETNGETGEIVWDKGRDFATVRKVLSMPQVNIVKKTEVQTGGFSKESILPKRNSDKLIARKKDWDPKKYGGFDSPTVAYSVLVVAKVEKGKSKKLKSVKELLGITIMERSSFEKNPIDFLEAKGYKEVKKDLIIKLPKYSLFELENGRKRMLASAGELQKGNELALPSKYVNFLYLASHYEKLKGSPEDNEQKQLFVEQHKHYLDEIIEQISEFSKRVILADANLDKVLSAYNKHRDKPIREQAENIIHLFTLTNLGAPAAFKYFDTTIDRKRYTSTKEVLDATLIHQSITGLYETRIDLSQLGGDPKKKRKVSGSETPGTSESATPESTGASGDLYEVERIVDKRKNKKGKWEYLIRWKGYGSTEDTWEPEHHLLHCEEFIDEFNGLHMSKDKRIKSGKQSSTSKLLRDS

SEQ ID NO: 985 - protein, 2105 aa, synthetic construct
  REGION 1..2105: note = Description of Artificial Sequence: Synthetic polypeptide
MNHDQEFDPPKVYPPVPAEKRKPIRVLSLFDGIATGLLVLKDLGIQVDRYIASEVCEDSITVGMVRHQGKIMYVGDVRSVTQKHIQEWGPFDLVIGGSPCNDLSIVNPARKGLYEGTGRLFFEFYRLLHDARPKEGDDRPFFWLFENVVAMGVSDKRDISRFLESNPVMIDAKEVSAAHRARYFWGNLPGMNRPLASTVNDKLELQECLEHGRIAKFSKVRTITTRSNSIKQGKDQHFPVFMNEKEDILWCTEMERVFGFPVHYTDVSNMSRLARQRLLGRSWSVPVIRHLFAPLKEYFACVSSGNSNANSRGPSFSSGLVPLSLRGSHMGPMEIYKTVSAWKRQPVRVLSLFRNIDKVLKSLGFLESGSGSGGGTLKYVEDVTNVVRRDVEKWGPFDLVYGSTQPLGSSCDRCPGWYMFQFHRILQYALPRQESQRPFFWIFMDNLLLTEDDQETTTRFLQTEAVTLQDVRGRDYQNAMRVWSNIPGLKSKHAPLTPKEEEYLQAQVRSRSKLDAPKVDLLVKNCLLPLREYFKYFSQNSLPLGGPSSGAPPPSGGSPAGSPTSTEEGTSESATPESGPGTSTEPSEGSAPGSPAGSPTSTEEGTSTEPSEGSAPGTSTEPSEPKKKRKVYMDKKYSIGLAIGTNSVGWAVITDEYKVPSKKFKVLGNTDRHSIKKNLIGALLFDSGETAEATRLKRTARRRYTRRKNRICYLQEIFSNEMAKVDDSFFHRLEESFLVEEDKKHERHPIFGNIVDEVAYHEKYPTIYHLRKKLVDSTDKADLRLIYLALAHMIKFRGHFLIEGDLNPDNSDVDKLFIQLVQTYNQLFEENPINASGVDAKAILSARLSKSRRLENLIAQLPGEKKNGLFGNLIALSLGLTPNFKSNFDLAEDAKLQLSKDTYDDDLDNLLAQIGDQYADLFLAAKNLSDAILLSDILRVNTEITKAPLSASMIKRYDEHHQDLTLLKALVRQQLPEKYKEIFFDQSKNGYAGYIDGGASQEEFYKFIKPILEKMDGTEELLVKLNREDLLRKQRTFDNGSIPHQIHLGELHAILRRQEDFYPFLKDNREKIEKILTFRIPYYVGPLARGNSRFAWMTRKSEETITPWNFEEVVDKGASAQSFIERMTNFDKNLPNEKVLPKHSLLYEYFTVYNELTKVKYVTEGMRKPAFLSGEQKKAIVDLLFKTNRKVTVKQLKEDYFKKIECFDSVEISGVEDRFNASLGTYHDLLKIIKDKDFLDNEENEDILEDIVLTLTLFEDREMIEERLKTYAHLFDDKVMKQLKRRRYTGWGRLSRKLINGIRDKQSGKTILDFLKSDGFANRNFMQLIHDDSLTFKEDIQKAQVSGQGDSLHEHIANLAGSPAIKKGILQTVKVVDELVKVMGRHKPENIVIEMARENQTTQKGQKNSRERMKRIEEGIKELGSQILKEHPVENTQLQNEKLYLYYLQNGRDMYVDQELDINRLSDYDVDAIVPQSFLKDDSIDNKVLTRSDKNRGKSDNVPSEEVVKKMKNYWRQLLNAKLITQRKFDNLTKAERGGLSELDKAGFIKRQLVETRQITKHVAQILDSRMNTKYDENDKLIREVKVITLKSKLVSDFRKDFQFYKVREINNYHHAHDAYLNAVVGTALIKKYPKLESEFVYGDYKVYDVRKMIAKSEQEIGKATAKYFFYSNIMNFFKTEITLANGEIRKRPLIETNGETGEIVWDKGRDFATVRKVLSMPQVNIVKKTEVQTGGFSKESILPKRNSDKLIARKKDWDPKKYGGFDSPTVAYSVLVVAKVEKGKSKKLKSVKELLGITIMERSSFEKNPIDFLEAKGYKEVKKDLIIKLPKYSLFELENGRKRMLASAGELQKGNELALPSKYVNFLYLASHYEKLKGSPEDNEQKQLFVEQHKHYLDEIIEQISEFSKRVILADANLDKVLSAYNKHRDKPIREQAENIIHLFTLTNLGAPAAFKYFDTTIDRKRYTSTKEVLDATLIHQSITGLYETRIDLSQLGGDPKKKRKVSGSETPGTSESATPESTGKDPNEPQKPVSAYALFFRDTQAAIKGQNPNATFGEVSKIVASMWDGLGEEQKQVYKKKTEAAKKEYLKQLAAYRASLVSK

SEQ ID NO: 986 - protein, 2105 aa, synthetic construct
  REGION 1..2105: note = Description of Artificial Sequence: Synthetic polypeptide
MNHDQEFDPPKVYPPVPAEKRKPIRVLSLFDGIATGLLVLKDLGIQVDRYIASEVCEDSITVGMVRHQGKIMYVGDVRSVTQKHIQEWGPFDLVIGGSPCNDLSIVNPARKGLYEGTGRLFFEFYRLLHDARPKEGDDRPFFWLFENVVAMGVSDKRDISRFLESNPVMIDAKEVSAAHRARYFWGNLPGMNRPLASTVNDKLELQECLEHGRIAKFSKVRTITTRSNSIKQGKDQHFPVFMNEKEDILWCTEMERVFGFPVHYTDVSNMSRLARQRLLGRSWSVPVIRHLFAPLKEYFACVSSGNSNANSRGPSFSSGLVPLSLRGSHMGPMEIYKTVSAWKRQPVRVLSLFRNIDKVLKSLGFLESGSGSGGGTLKYVEDVTNVVRRDVEKWGPFDLVYGSTQPLGSSCDRCPGWYMFQFHRILQYALPRQESQRPFFWIFMDNLLLTEDDQETTTRFLQTEAVTLQDVRGRDYQNAMRVWSNIPGLKSKHAPLTPKEEEYLQAQVRSRSKLDAPKVDLLVKNCLLPLREYFKYFSQNSLPLGGPSSGAPPPSGGSPAGSPTSTEEGTSESATPESGPGTSTEPSEGSAPGSPAGSPTSTEEGTSTEPSEGSAPGTSTEPSEPKKKRKVYMDKKYSIGLAIGTNSVGWAVITDEYKVPSKKFKVLGNTDRHSIKKNLIGALLFDSGETAEATRLKRTARRRYTRRKNRICYLQEIFSNEMAKVDDSFFHRLEESFLVEEDKKHERHPIFGNIVDEVAYHEKYPTIYHLRKKLVDSTDKADLRLIYLALAHMIKFRGHFLIEGDLNPDNSDVDKLFIQLVQTYNQLFEENPINASGVDAKAILSARLSKSRRLENLIAQLPGEKKNGLFGNLIALSLGLTPNFKSNFDLAEDAKLQLSKDTYDDDLDNLLAQIGDQYADLFLAAKNLSDAILLSDILRVNTEITKAPLSASMIKRYDEHHQDLTLLKALVRQQLPEKYKEIFFDQSKNGYAGYIDGGASQEEFYKFIKPILEKMDGTEELLVKLNREDLLRKQRTFDNGSIPHQIHLGELHAILRRQEDFYPFLKDNREKIEKILTFRIPYYVGPLARGNSRFAWMTRKSEETITPWNFEEVVDKGASAQSFIERMTNFDKNLPNEKVLPKHSLLYEYFTVYNELTKVKYVTEGMRKPAFLSGEQKKAIVDLLFKTNRKVTVKQLKEDYFKKIECFDSVEISGVEDRFNASLGTYHDLLKIIKDKDFLDNEENEDILEDIVLTLTLFEDREMIEERLKTYAHLFDDKVMKQLKRRRYTGWGRLSRKLINGIRDKQSGKTILDFLKSDGFANRNFMQLIHDDSLTFKEDIQKAQVSGQGDSLHEHIANLAGSPAIKKGILQTVKVVDELVKVMGRHKPENIVIEMARENQTTQKGQKNSRERMKRIEEGIKELGSQILKEHPVENTQLQNEKLYLYYLQNGRDMYVDQELDINRLSDYDVDAIVPQSFLKDDSIDNKVLTRSDKNRGKSDNVPSEEVVKKMKNYWRQLLNAKLITQRKFDNLTKAERGGLSELDKAGFIKRQLVETRQITKHVAQILDSRMNTKYDENDKLIREVKVITLKSKLVSDFRKDFQFYKVREINNYHHAHDAYLNAVVGTALIKKYPKLESEFVYGDYKVYDVRKMIAKSEQEIGKATAKYFFYSNIMNFFKTEITLANGEIRKRPLIETNGETGEIVWDKGRDFATVRKVLSMPQVNIVKKTEVQTGGFSKESILPKRNSDKLIARKKDWDPKKYGGFDSPTVAYSVLVVAKVEKGKSKKLKSVKELLGITIMERSSFEKNPIDFLEAKGYKEVKKDLIIKLPKYSLFELENGRKRMLASAGELQKGNELALPSKYVNFLYLASHYEKLKGSPEDNEQKQLFVEQHKHYLDEIIEQISEFSKRVILADANLDKVLSAYNKHRDKPIREQAENIIHLFTLTNLGAPAAFKYFDTTIDRKRYTSTKEVLDATLIHQSITGLYETRIDLSQLGGDPKKKRKVSGSETPGTSESATPESTGDASRLSGRDPSSWTVEDVMQFVREADPQLGPHADLFRKHEIDGKALLLLRSDMMMKYMGLKLGPALKLSYHIDRLKQGKF

SEQ ID NO: 987 - protein, 2105 aa, synthetic construct
  REGION 1..2105: note = Description of Artificial Sequence: Synthetic polypeptide
MNHDQEFDPPKVYPPVPAEKRKPIRVLSLFDGIATGLLVLKDLGIQVDRYIASEVCEDSITVGMVRHQGKIMYVGDVRSVTQKHIQEWGPFDLVIGGSPCNDLSIVNPARKGLYEGTGRLFFEFYRLLHDARPKEGDDRPFFWLFENVVAMGVSDKRDISRFLESNPVMIDAKEVSAAHRARYFWGNLPGMNRPLASTVNDKLELQECLEHGRIAKFSKVRTITTRSNSIKQGKDQHFPVFMNEKEDILWCTEMERVFGFPVHYTDVSNMSRLARQRLLGRSWSVPVIRHLFAPLKEYFACVSSGNSNANSRGPSFSSGLVPLSLRGSHMGPMEIYKTVSAWKRQPVRVLSLFRNIDKVLKSLGFLESGSGSGGGTLKYVEDVTNVVRRDVEKWGPFDLVYGSTQPLGSSCDRCPGWYMFQFHRILQYALPRQESQRPFFWIFMDNLLLTEDDQETTTRFLQTEAVTLQDVRGRDYQNAMRVWSNIPGLKSKHAPLTPKEEEYLQAQVRSRSKLDAPKVDLLVKNCLLPLREYFKYFSQNSLPLGGPSSGAPPPSGGSPAGSPTSTEEGTSESATPESGPGTSTEPSEGSAPGSPAGSPTSTEEGTSTEPSEGSAPGTSTEPSEPKKKRKVYMDKKYSIGLAIGTNSVGWAVITDEYKVPSKKFKVLGNTDRHSIKKNLIGALLFDSGETAEATRLKRTARRRYTRRKNRICYLQEIFSNEMAKVDDSFFHRLEESFLVEEDKKHERHPIFGNIVDEVAYHEKYPTIYHLRKKLVDSTDKADLRLIYLALAHMIKFRGHFLIEGDLNPDNSDVDKLFIQLVQTYNQLFEENPINASGVDAKAILSARLSKSRRLENLIAQLPGEKKNGLFGNLIALSLGLTPNFKSNFDLAEDAKLQLSKDTYDDDLDNLLAQIGDQYADLFLAAKNLSDAILLSDILRVNTEITKAPLSASMIKRYDEHHQDLTLLKALVRQQLPEKYKEIFFDQSKNGYAGYIDGGASQEEFYKFIKPILEKMDGTEELLVKLNREDLLRKQRTFDNGSIPHQIHLGELHAILRRQEDFYPFLKDNREKIEKILTFRIPYYVGPLARGNSRFAWMTRKSEETITPWNFEEVVDKGASAQSFIERMTNFDKNLPNEKVLPKHSLLYEYFTVYNELTKVKYVTEGMRKPAFLSGEQKKAIVDLLFKTNRKVTVKQLKEDYFKKIECFDSVEISGVEDRFNASLGTYHDLLKIIKDKDFLDNEENEDILEDIVLTLTLFEDREMIEERLKTYAHLFDDKVMKQLKRRRYTGWGRLSRKLINGIRDKQSGKTILDFLKSDGFANRNFMQLIHDDSLTFKEDIQKAQVSGQGDSLHEHIANLAGSPAIKKGILQTVKVVDELVKVMGRHKPENIVIEMARENQTTQKGQKNSRERMKRIEEGIKELGSQILKEHPVENTQLQNEKLYLYYLQNGRDMYVDQELDINRLSDYDVDAIVPQSFLKDDSIDNKVLTRSDKNRGKSDNVPSEEVVKKMKNYWRQLLNAKLITQRKFDNLTKAERGGLSELDKAGFIKRQLVETRQITKHVAQILDSRMNTKYDENDKLIREVKVITLKSKLVSDFRKDFQFYKVREINNYHHAHDAYLNAVVGTALIKKYPKLESEFVYGDYKVYDVRKMIAKSEQEIGKATAKYFFYSNIMNFFKTEITLANGEIRKRPLIETNGETGEIVWDKGRDFATVRKVLSMPQVNIVKKTEVQTGGFSKESILPKRNSDKLIARKKDWDPKKYGGFDSPTVAYSVLVVAKVEKGKSKKLKSVKELLGITIMERSSFEKNPIDFLEAKGYKEVKKDLIIKLPKYSLFELENGRKRMLASAGELQKGNELALPSKYVNFLYLASHYEKLKGSPEDNEQKQLFVEQHKHYLDEIIEQISEFSKRVILADANLDKVLSAYNKHRDKPIREQAENIIHLFTLTNLGAPAAFKYFDTTIDRKRYTSTKEVLDATLIHQSITGLYETRIDLSQLGGDPKKKRKVSGSETPGTSESATPESTGKQGFSKDPSTWSVDEVIQFMKHTDPQISGPLADLFRQHEIDGKALFLLKSDVMMKYMGLKLGPALKLCYYIEKLKEGKYS

SEQ ID NO: 988 - protein, 2105 aa, synthetic construct
  REGION 1..2105: note = Description of Artificial Sequence: Synthetic polypeptide
MNHDQEFDPPKVYPPVPAEKRKPIRVLSLFDGIATGLLVLKDLGIQVDRYIASEVCEDSITVGMVRHQGKIMYVGDVRSVTQKHIQEWGPFDLVIGGSPCNDLSIVNPARKGLYEGTGRLFFEFYRLLHDARPKEGDDRPFFWLFENVVAMGVSDKRDISRFLESNPVMIDAKEVSAAHRARYFWGNLPGMNRPLASTVNDKLELQECLEHGRIAKFSKVRTITTRSNSIKQGKDQHFPVFMNEKEDILWCTEMERVFGFPVHYTDVSNMSRLARQRLLGRSWSVPVIRHLFAPLKEYFACVSSGNSNANSRGPSFSSGLVPLSLRGSHMGPMEIYKTVSAWKRQPVRVLSLFRNIDKVLKSLGFLESGSGSGGGTLKYVEDVTNVVRRDVEKWGPFDLVYGSTQPLGSSCDRCPGWYMFQFHRILQYALPRQESQRPFFWIFMDNLLLTEDDQETTTRFLQTEAVTLQDVRGRDYQNAMRVWSNIPGLKSKHAPLTPKEEEYLQAQVRSRSKLDAPKVDLLVKNCLLPLREYFKYFSQNSLPLGGPSSGAPPPSGGSPAGSPTSTEEGTSESATPESGPGTSTEPSEGSAPGSPAGSPTSTEEGTSTEPSEGSAPGTSTEPSEPKKKRKVYMDKKYSIGLAIGTNSVGWAVITDEYKVPSKKFKVLGNTDRHSIKKNLIGALLFDSGETAEATRLKRTARRRYTRRKNRICYLQEIFSNEMAKVDDSFFHRLEESFLVEEDKKHERHPIFGNIVDEVAYHEKYPTIYHLRKKLVDSTDKADLRLIYLALAHMIKFRGHFLIEGDLNPDNSDVDKLFIQLVQTYNQLFEENPINASGVDAKAILSARLSKSRRLENLIAQLPGEKKNGLFGNLIALSLGLTPNFKSNFDLAEDAKLQLSKDTYDDDLDNLLAQIGDQYADLFLAAKNLSDAILLSDILRVNTEITKAPLSASMIKRYDEHHQDLTLLKALVRQQLPEKYKEIFFDQSKNGYAGYIDGGASQEEFYKFIKPILEKMDGTEELLVKLNREDLLRKQRTFDNGSIPHQIHLGELHAILRRQEDFYPFLKDNREKIEKILTFRIPYYVGPLARGNSRFAWMTRKSEETITPWNFEEVVDKGASAQSFIERMTNFDKNLPNEKVLPKHSLLYEYFTVYNELTKVKYVTEGMRKPAFLSGEQKKAIVDLLFKTNRKVTVKQLKEDYFKKIECFDSVEISGVEDRFNASLGTYHDLLKIIKDKDFLDNEENEDILEDIVLTLTLFEDREMIEERLKTYAHLFDDKVMKQLKRRRYTGWGRLSRKLINGIRDKQSGKTILDFLKSDGFANRNFMQLIHDDSLTFKEDIQKAQVSGQGDSLHEHIANLAGSPAIKKGILQTVKVVDELVKVMGRHKPENIVIEMARENQTTQKGQKNSRERMKRIEEGIKELGSQILKEHPVENTQLQNEKLYLYYLQNGRDMYVDQELDINRLSDYDVDAIVPQSFLKDDSIDNKVLTRSDKNRGKSDNVPSEEVVKKMKNYWRQLLNAKLITQRKFDNLTKAERGGLSELDKAGFIKRQLVETRQITKHVAQILDSRMNTKYDENDKLIREVKVITLKSKLVSDFRKDFQFYKVREINNYHHAHDAYLNAVVGTALIKKYPKLESEFVYGDYKVYDVRKMIAKSEQEIGKATAKYFFYSNIMNFFKTEITLANGEIRKRPLIETNGETGEIVWDKGRDFATVRKVLSMPQVNIVKKTEVQTGGFSKESILPKRNSDKLIARKKDWDPKKYGGFDSPTVAYSVLVVAKVEKGKSKKLKSVKELLGITIMERSSFEKNPIDFLEAKGYKEVKKDLIIKLPKYSLFELENGRKRMLASAGELQKGNELALPSKYVNFLYLASHYEKLKGSPEDNEQKQLFVEQHKHYLDEIIEQISEFSKRVILADANLDKVLSAYNKHRDKPIREQAENIIHLFTLTNLGAPAAFKYFDTTIDRKRYTSTKEVLDATLIHQSITGLYETRIDLSQLGGDPKKKRKVSGSETPGTSESATPESTGGSGPPSSGGGLYRDMGAQGGRPSLIARIPVARILGDPEEESWSPSLTNLEKVVVTDVTSNFLTVTIKESNTDQGFFKEKR

SEQ ID NO: 989 - protein, 2105 aa, synthetic construct
  REGION 1..2105: note = Description of Artificial Sequence: Synthetic polypeptide
MNHDQEFDPPKVYPPVPAEKRKPIRVLSLFDGIATGLLVLKDLGIQVDRYIASEVCEDSITVGMVRHQGKIMYVGDVRSVTQKHIQEWGPFDLVIGGSPCNDLSIVNPARKGLYEGTGRLFFEFYRLLHDARPKEGDDRPFFWLFENVVAMGVSDKRDISRFLESNPVMIDAKEVSAAHRARYFWGNLPGMNRPLASTVNDKLELQECLEHGRIAKFSKVRTITTRSNSIKQGKDQHFPVFMNEKEDILWCTEMERVFGFPVHYTDVSNMSRLARQRLLGRSWSVPVIRHLFAPLKEYFACVSSGNSNANSRGPSFSSGLVPLSLRGSHMGPMEIYKTVSAWKRQPVRVLSLFRNIDKVLKSLGFLESGSGSGGGTLKYVEDVTNVVRRDVEKWGPFDLVYGSTQPLGSSCDRCPGWYMFQFHRILQYALPRQESQRPFFWIFMDNLLLTEDDQETTTRFLQTEAVTLQDVRGRDYQNAMRVWSNIPGLKSKHAPLTPKEEEYLQAQVRSRSKLDAPKVDLLVKNCLLPLREYFKYFSQNSLPLGGPSSGAPPPSGGSPAGSPTSTEEGTSESATPESGPGTSTEPSEGSAPGSPAGSPTSTEEGTSTEPSEGSAPGTSTEPSEPKKKRKVYMDKKYSIGLAIGTNSVGWAVITDEYKVPSKKFKVLGNTDRHSIKKNLIGALLFDSGETAEATRLKRTARRRYTRRKNRICYLQEIFSNEMAKVDDSFFHRLEESFLVEEDKKHERHPIFGNIVDEVAYHEKYPTIYHLRKKLVDSTDKADLRLIYLALAHMIKFRGHFLIEGDLNPDNSDVDKLFIQLVQTYNQLFEENPINASGVDAKAILSARLSKSRRLENLIAQLPGEKKNGLFGNLIALSLGLTPNFKSNFDLAEDAKLQLSKDTYDDDLDNLLAQIGDQYADLFLAAKNLSDAILLSDILRVNTEITKAPLSASMIKRYDEHHQDLTLLKALVRQQLPEKYKEIFFDQSKNGYAGYIDGGASQEEFYKFIKPILEKMDGTEELLVKLNREDLLRKQRTFDNGSIPHQIHLGELHAILRRQEDFYPFLKDNREKIEKILTFRIPYYVGPLARGNSRFAWMTRKSEETITPWNFEEVVDKGASAQSFIERMTNFDKNLPNEKVLPKHSLLYEYFTVYNELTKVKYVTEGMRKPAFLSGEQKKAIVDLLFKTNRKVTVKQLKEDYFKKIECFDSVEISGVEDRFNASLGTYHDLLKIIKDKDFLDNEENEDILEDIVLTLTLFEDREMIEERLKTYAHLFDDKVMKQLKRRRYTGWGRLSRKLINGIRDKQSGKTILDFLKSDGFANRNFMQLIHDDSLTFKEDIQKAQVSGQGDSLHEHIANLAGSPAIKKGILQTVKVVDELVKVMGRHKPENIVIEMARENQTTQKGQKNSRERMKRIEEGIKELGSQILKEHPVENTQLQNEKLYLYYLQNGRDMYVDQELDINRLSDYDVDAIVPQSFLKDDSIDNKVLTRSDKNRGKSDNVPSEEVVKKMKNYWRQLLNAKLITQRKFDNLTKAERGGLSELDKAGFIKRQLVETRQITKHVAQILDSRMNTKYDENDKLIREVKVITLKSKLVSDFRKDFQFYKVREINNYHHAHDAYLNAVVGTALIKKYPKLESEFVYGDYKVYDVRKMIAKSEQEIGKATAKYFFYSNIMNFFKTEITLANGEIRKRPLIETNGETGEIVWDKGRDFATVRKVLSMPQVNIVKKTEVQTGGFSKESILPKRNSDKLIARKKDWDPKKYGGFDSPTVAYSVLVVAKVEKGKSKKLKSVKELLGITIMERSSFEKNPIDFLEAKGYKEVKKDLIIKLPKYSLFELENGRKRMLASAGELQKGNELALPSKYVNFLYLASHYEKLKGSPEDNEQKQLFVEQHKHYLDEIIEQISEFSKRVILADANLDKVLSAYNKHRDKPIREQAENIIHLFTLTNLGAPAAFKYFDTTIDRKRYTSTKEVLDATLIHQSITGLYETRIDLSQLGGDPKKKRKVSGSETPGTSESATPESTGKDPNEPQKPVSAYALFFRDTQAAIKGQNPNATFGEVSKIVASMWDSLGEEQKQVYKRKTEAAKKEYLKALAAYRASLVSK

SEQ ID NO: 990 - protein, 2105 aa, synthetic construct
  REGION 1..2105: note = Description of Artificial Sequence: Synthetic polypeptide
MNHDQEFDPPKVYPPVPAEKRKPIRVLSLFDGIATGLLVLKDLGIQVDRYIASEVCEDSITVGMVRHQGKIMYVGDVRSVTQKHIQEWGPFDLVIGGSPCNDLSIVNPARKGLYEGTGRLFFEFYRLLHDARPKEGDDRPFFWLFENVVAMGVSDKRDISRFLESNPVMIDAKEVSAAHRARYFWGNLPGMNRPLASTVNDKLELQECLEHGRIAKFSKVRTITTRSNSIKQGKDQHFPVFMNEKEDILWCTEMERVFGFPVHYTDVSNMSRLARQRLLGRSWSVPVIRHLFAPLKEYFACVSSGNSNANSRGPSFSSGLVPLSLRGSHMGPMEIYKTVSAWKRQPVRVLSLFRNIDKVLKSLGFLESGSGSGGGTLKYVEDVTNVVRRDVEKWGPFDLVYGSTQPLGSSCDRCPGWYMFQFHRILQYALPRQESQRPFFWIFMDNLLLTEDDQETTTRFLQTEAVTLQDVRGRDYQNAMRVWSNIPGLKSKHAPLTPKEEEYLQAQVRSRSKLDAPKVDLLVKNCLLPLREYFKYFSQNSLPLGGPSSGAPPPSGGSPAGSPTSTEEGTSESATPESGPGTSTEPSEGSAPGSPAGSPTSTEEGTSTEPSEGSAPGTSTEPSEPKKKRKVYMDKKYSIGLAIGTNSVGWAVITDEYKVPSKKFKVLGNTDRHSIKKNLIGALLFDSGETAEATRLKRTARRRYTRRKNRICYLQEIFSNEMAKVDDSFFHRLEESFLVEEDKKHERHPIFGNIVDEVAYHEKYPTIYHLRKKLVDSTDKADLRLIYLALAHMIKFRGHFLIEGDLNPDNSDVDKLFIQLVQTYNQLFEENPINASGVDAKAILSARLSKSRRLENLIAQLPGEKKNGLFGNLIALSLGLTPNFKSNFDLAEDAKLQLSKDTYDDDLDNLLAQIGDQYADLFLAAKNLSDAILLSDILRVNTEITKAPLSASMIKRYDEHHQDLTLLKALVRQQLPEKYKEIFFDQSKNGYAGYIDGGASQEEFYKFIKPILEKMDGTEELLVKLNREDLLRKQRTFDNGSIPHQIHLGELHAILRRQEDFYPFLKDNREKIEKILTFRIPYYVGPLARGNSRFAWMTRKSEETITPWNFEEVVDKGASAQSFIERMTNFDKNLPNEKVLPKHSLLYEYFTVYNELTKVKYVTEGMRKPAFLSGEQKKAIVDLLFKTNRKVTVKQLKEDYFKKIECFDSVEISGVEDRFNASLGTYHDLLKIIKDKDFLDNEENEDILEDIVLTLTLFEDREMIEERLKTYAHLFDDKVMKQLKRRRYTGWGRLSRKLINGIRDKQSGKTILDFLKSDGFANRNFMQLIHDDSLTFKEDIQKAQVSGQGDSLHEHIANLAGSPAIKKGILQTVKVVDELVKVMGRHKPENIVIEMARENQTTQKGQKNSRERMKRIEEGIKELGSQILKEHPVENTQLQNEKLYLYYLQNGRDMYVDQELDINRLSDYDVDAIVPQSFLKDDSIDNKVLTRSDKNRGKSDNVPSEEVVKKMKNYWRQLLNAKLITQRKFDNLTKAERGGLSELDKAGFIKRQLVETRQITKHVAQILDSRMNTKYDENDKLIREVKVITLKSKLVSDFRKDFQFYKVREINNYHHAHDAYLNAVVGTALIKKYPKLESEFVYGDYKVYDVRKMIAKSEQEIGKATAKYFFYSNIMNFFKTEITLANGEIRKRPLIETNGETGEIVWDKGRDFATVRKVLSMPQVNIVKKTEVQTGGFSKESILPKRNSDKLIARKKDWDPKKYGGFDSPTVAYSVLVVAKVEKGKSKKLKSVKELLGITIMERSSFEKNPIDFLEAKGYKEVKKDLIIKLPKYSLFELENGRKRMLASAGELQKGNELALPSKYVNFLYLASHYEKLKGSPEDNEQKQLFVEQHKHYLDEIIEQISEFSKRVILADANLDKVLSAYNKHRDKPIREQAENIIHLFTLTNLGAPAAFKYFDTTIDRKRYTSTKEVLDATLIHQSITGLYETRIDLSQLGGDPKKKRKVSGSETPGTSESATPESTGKDPNEPQKPVSAYALFFRDTQAAIKGQNPNATFGEVSKIVASMWDSLGEEQKQVYKRKTEAAKKEYLKALAAYKDNQECQ

SEQ ID NO: 991 - protein, 2105 aa, synthetic construct
  REGION 1..2105: note = Description of Artificial Sequence: Synthetic polypeptide
MNHDQEFDPPKVYPPVPAEKRKPIRVLSLFDGIATGLLVLKDLGIQVDRYIASEVCEDSITVGMVRHQGKIMYVGDVRSVTQKHIQEWGPFDLVIGGSPCNDLSIVNPARKGLYEGTGRLFFEFYRLLHDARPKEGDDRPFFWLFENVVAMGVSDKRDISRFLESNPVMIDAKEVSAAHRARYFWGNLPGMNRPLASTVNDKLELQECLEHGRIAKFSKVRTITTRSNSIKQGKDQHFPVFMNEKEDILWCTEMERVFGFPVHYTDVSNMSRLARQRLLGRSWSVPVIRHLFAPLKEYFACVSSGNSNANSRGPSFSSGLVPLSLRGSHMGPMEIYKTVSAWKRQPVRVLSLFRNIDKVLKSLGFLESGSGSGGGTLKYVEDVTNVVRRDVEKWGPFDLVYGSTQPLGSSCDRCPGWYMFQFHRILQYALPRQESQRPFFWIFMDNLLLTEDDQETTTRFLQTEAVTLQDVRGRDYQNAMRVWSNIPGLKSKHAPLTPKEEEYLQAQVRSRSKLDAPKVDLLVKNCLLPLREYFKYFSQNSLPLGGPSSGAPPPSGGSPAGSPTSTEEGTSESATPESGPGTSTEPSEGSAPGSPAGSPTSTEEGTSTEPSEGSAPGTSTEPSEPKKKRKVYMDKKYSIGLAIGTNSVGWAVITDEYKVPSKKFKVLGNTDRHSIKKNLIGALLFDSGETAEATRLKRTARRRYTRRKNRICYLQEIFSNEMAKVDDSFFHRLEESFLVEEDKKHERHPIFGNIVDEVAYHEKYPTIYHLRKKLVDSTDKADLRLIYLALAHMIKFRGHFLIEGDLNPDNSDVDKLFIQLVQTYNQLFEENPINASGVDAKAILSARLSKSRRLENLIAQLPGEKKNGLFGNLIALSLGLTPNFKSNFDLAEDAKLQLSKDTYDDDLDNLLAQIGDQYADLFLAAKNLSDAILLSDILRVNTEITKAPLSASMIKRYDEHHQDLTLLKALVRQQLPEKYKEIFFDQSKNGYAGYIDGGASQEEFYKFIKPILEKMDGTEELLVKLNREDLLRKQRTFDNGSIPHQIHLGELHAILRRQEDFYPFLKDNREKIEKILTFRIPYYVGPLARGNSRFAWMTRKSEETITPWNFEEVVDKGASAQSFIERMTNFDKNLPNEKVLPKHSLLYEYFTVYNELTKVKYVTEGMRKPAFLSGEQKKAIVDLLFKTNRKVTVKQLKEDYFKKIECFDSVEISGVEDRFNASLGTYHDLLKIIKDKDFLDNEENEDILEDIVLTLTLFEDREMIEERLKTYAHLFDDKVMKQLKRRRYTGWGRLSRKLINGIRDKQSGKTILDFLKSDGFANRNFMQLIHDDSLTFKEDIQKAQVSGQGDSLHEHIANLAGSPAIKKGILQTVKVVDELVKVMGRHKPENIVIEMARENQTTQKGQKNSRERMKRIEEGIKELGSQILKEHPVENTQLQNEKLYLYYLQNGRDMYVDQELDINRLSDYDVDAIVPQSFLKDDSIDNKVLTRSDKNRGKSDNVPSEEVVKKMKNYWRQLLNAKLITQRKFDNLTKAERGGLSELDKAGFIKRQLVETRQITKHVAQILDSRMNTKYDENDKLIREVKVITLKSKLVSDFRKDFQFYKVREINNYHHAHDAYLNAVVGTALIKKYPKLESEFVYGDYKVYDVRKMIAKSEQEIGKATAKYFFYSNIMNFFKTEITLANGEIRKRPLIETNGETGEIVWDKGRDFATVRKVLSMPQVNIVKKTEVQTGGFSKESILPKRNSDKLIARKKDWDPKKYGGFDSPTVAYSVLVVAKVEKGKSKKLKSVKELLGITIMERSSFEKNPIDFLEAKGYKEVKKDLIIKLPKYSLFELENGRKRMLASAGELQKGNELALPSKYVNFLYLASHYEKLKGSPEDNEQKQLFVEQHKHYLDEIIEQISEFSKRVILADANLDKVLSAYNKHRDKPIREQAENIIHLFTLTNLGAPAAFKYFDTTIDRKRYTSTKEVLDATLIHQSITGLYETRIDLSQLGGDPKKKRKVSGSETPGTSESATPESTGASVQASRRQWCYLCDLPKMPWAMVWDFSEAVCRGCVNFEGADRIELLIDAARQLKRSHVLPEGRSPGPPALKHPATKDLA

SEQ ID NO: 992 - protein, 2436 aa, synthetic construct
  REGION 1..2436: note = Description of Artificial Sequence: Synthetic polypeptide
MNHDQEFDPPKVYPPVPAEKRKPIRVLSLFDGIATGLLVLKDLGIQVDRYIASEVCEDSITVGMVRHQGKIMYVGDVRSVTQKHIQEWGPFDLVIGGSPCNDLSIVNPARKGLYEGTGRLFFEFYRLLHDARPKEGDDRPFFWLFENVVAMGVSDKRDISRFLESNPVMIDAKEVSAAHRARYFWGNLPGMNRPLASTVNDKLELQECLEHGRIAKFSKVRTITTRSNSIKQGKDQHFPVFMNEKEDILWCTEMERVFGFPVHYTDVSNMSRLARQRLLGRSWSVPVIRHLFAPLKEYFACVSSGNSNANSRGPSFSSGLVPLSLRGSHMGPMEIYKTVSAWKRQPVRVLSLFRNIDKVLKSLGFLESGSGSGGGTLKYVEDVTNVVRRDVEKWGPFDLVYGSTQPLGSSCDRCPGWYMFQFHRILQYALPRQESQRPFFWIFMDNLLLTEDDQETTTRFLQTEAVTLQDVRGRDYQNAMRVWSNIPGLKSKHAPLTPKEEEYLQAQVRSRSKLDAPKVDLLVKNCLLPLREYFKYFSQNSLPLGGPSSGAPPPSGGSPAGSPTSTEEGTSESATPESGPGTSTEPSEGSAPGSPAGSPTSTEEGTSTEPSEGSAPGTSTEPSEPKKKRKVYMDKKYSIGLAIGTNSVGWAVITDEYKVPSKKFKVLGNTDRHSIKKNLIGALLFDSGETAEATRLKRTARRRYTRRKNRICYLQEIFSNEMAKVDDSFFHRLEESFLVEEDKKHERHPIFGNIVDEVAYHEKYPTIYHLRKKLVDSTDKADLRLIYLALAHMIKFRGHFLIEGDLNPDNSDVDKLFIQLVQTYNQLFEENPINASGVDAKAILSARLSKSRRLENLIAQLPGEKKNGLFGNLIALSLGLTPNFKSNFDLAEDAKLQLSKDTYDDDLDNLLAQIGDQYADLFLAAKNLSDAILLSDILRVNTEITKAPLSASMIKRYDEHHQDLTLLKALVRQQLPEKYKEIFFDQSKNGYAGYIDGGASQEEFYKFIKPILEKMDGTEELLVKLNREDLLRKQRTFDNGSIPHQIHLGELHAILRRQEDFYPFLKDNREKIEKILTFRIPYYVGPLARGNSRFAWMTRKSEETITPWNFEEVVDKGASAQSFIERMTNFDKNLPNEKVLPKHSLLYEYFTVYNELTKVKYVTEGMRKPAFLSGEQKKAIVDLLFKTNRKVTVKQLKEDYFKKIECFDSVEISGVEDRFNASLGTYHDLLKIIKDKDFLDNEENEDILEDIVLTLTLFEDREMIEERLKTYAHLFDDKVMKQLKRRRYTGWGRLSRKLINGIRDKQSGKTILDFLKSDGFANRNFMQLIHDDSLTFKEDIQKAQVSGQGDSLHEHIANLAGSPAIKKGILQTVKVVDELVKVMGRHKPENIVIEMARENQTTQKGQKNSRERMKRIEEGIKELGSQILKEHPVENTQLQNEKLYLYYLQNGRDMYVDQELDINRLSDYDVDAIVPQSFLKDDSIDNKVLTRSDKNRGKSDNVPSEEVVKKMKNYWRQLLNAKLITQRKFDNLTKAERGGLSELDKAGFIKRQLVETRQITKHVAQILDSRMNTKYDENDKLIREVKVITLKSKLVSDFRKDFQFYKVREINNYHHAHDAYLNAVVGTALIKKYPKLESEFVYGDYKVYDVRKMIAKSEQEIGKATAKYFFYSNIMNFFKTEITLANGEIRKRPLIETNGETGEIVWDKGRDFATVRKVLSMPQVNIVKKTEVQTGGFSKESILPKRNSDKLIARKKDWDPKKYGGFDSPTVAYSVLVVAKVEKGKSKKLKSVKELLGITIMERSSFEKNPIDFLEAKGYKEVKKDLIIKLPKYSLFELENGRKRMLASAGELQKGNELALPSKYVNFLYLASHYEKLKGSPEDNEQKQLFVEQHKHYLDEIIEQISEFSKRVILADANLDKVLSAYNKHRDKPIREQAENIIHLFTLTNLGAPAAFKYFDTTIDRKRYTSTKEVLDATLIHQSITGLYETRIDLSQLGGDPKKKRKVSGSETPGTSESATPESTGMRAHPGGGRCCPEQEEGESAAGGSGAGGDSAIEQGGQGSALAPSPVSGVRREGARGGGRGRGRWKQAGRGGGVCGRGRGRGRGRGRGRGRGRGRGRPPSGGSGLGGDGGGCGGGGSGGGGAPRREPVPFPSGSAGPGPRGPRATESGKRMDCPALPPGWKKEEVIRKSGLSAGKSDVYYFSPSGKKFRSKPQLARYLGNTVDLSSFDFRTGKMMPSKLQKNKQRLRNDPLNQNKGKPDLNTTLPIRQTASIFKQPVTKVTNHPSNKVKSDPQRMNEQPRQLFWEKRLQGLSASDVTEQIIKTMELPKGLQGVGPGSNDETLLSAVASALHTSSAPITGQVSAAVEKNPAVWLNTSQPLCKAFIVTDEDIRKQEERVQQVRKKLEEALMADILSRAADTEEMDIEMDSGDEA

SEQ ID NO: 993 - protein, 3316 aa, synthetic construct
  REGION 1..3316: note = Description of Artificial Sequence: Synthetic polypeptide
MNHDQEFDPPKVYPPVPAEKRKPIRVLSLFDGIATGLLVLKDLGIQVDRYIASEVCEDSITVGMVRHQGKIMYVGDVRSVTQKHIQEWGPFDLVIGGSPCNDLSIVNPARKGLYEGTGRLFFEFYRLLHDARPKEGDDRPFFWLFENVVAMGVSDKRDISRFLESNPVMIDAKEVSAAHRARYFWGNLPGMNRPLASTVNDKLELQECLEHGRIAKFSKVRTITTRSNSIKQGKDQHFPVFMNEKEDILWCTEMERVFGFPVHYTDVSNMSRLARQRLLGRSWSVPVIRHLFAPLKEYFACVSSGNSNANSRGPSFSSGLVPLSLRGSHMGPMEIYKTVSAWKRQPVRVLSLFRNIDKVLKSLGFLESGSGSGGGTLKYVEDVTNVVRRDVEKWGPFDLVYGSTQPLGSSCDRCPGWYMFQFHRILQYALPRQESQRPFFWIFMDNLLLTEDDQETTTRFLQTEAVTLQDVRGRDYQNAMRVWSNIPGLKSKHAPLTPKEEEYLQAQVRSRSKLDAPKVDLLVKNCLLPLREYFKYFSQNSLPLGGPSSGAPPPSGGSPAGSPTSTEEGTSESATPESGPGTSTEPSEGSAPGSPAGSPTSTEEGTSTEPSEGSAPGTSTEPSEPKKKRKVYMDKKYSIGLAIGTNSVGWAVITDEYKVPSKKFKVLGNTDRHSIKKNLIGALLFDSGETAEATRLKRTARRRYTRRKNRICYLQEIFSNEMAKVDDSFFHRLEESFLVEEDKKHERHPIFGNIVDEVAYHEKYPTIYHLRKKLVDSTDKADLRLIYLALAHMIKFRGHFLIEGDLNPDNSDVDKLFIQLVQTYNQLFEENPINASGVDAKAILSARLSKSRRLENLIAQLPGEKKNGLFGNLIALSLGLTPNFKSNFDLAEDAKLQLSKDTYDDDLDNLLAQIGDQYADLFLAAKNLSDAILLSDILRVNTEITKAPLSASMIKRYDEHHQDLTLLKALVRQQLPEKYKEIFFDQSKNGYAGYIDGGASQEEFYKFIKPILEKMDGTEELLVKLNREDLLRKQRTFDNGSIPHQIHLGELHAILRRQEDFYPFLKDNREKIEKILTFRIPYYVGPLARGNSRFAWMTRKSEETITPWNFEEVVDKGASAQSFIERMTNFDKNLPNEKVLPKHSLLYEYFTVYNELTKVKYVTEGMRKPAFLSGEQKKAIVDLLFKTNRKVTVKQLKEDYFKKIECFDSVEISGVEDRFNASLGTYHDLLKIIKDKDFLDNEENEDILEDIVLTLTLFEDREMIEERLKTYAHLFDDKVMKQLKRRRYTGWGRLSRKLINGIRDKQSGKTILDFLKSDGFANRNFMQLIHDDSLTFKEDIQKAQVSGQGDSLHEHIANLAGSPAIKKGILQTVKVVDELVKVMGRHKPENIVIEMARENQTTQKGQKNSRERMKRIEEGIKELGSQILKEHPVENTQLQNEKLYLYYLQNGRDMYVDQELDINRLSDYDVDAIVPQSFLKDDSIDNKVLTRSDKNRGKSDNVPSEEVVKKMKNYWRQLLNAKLITQRKFDNLTKAERGGLSELDKAGFIKRQLVETRQITKHVAQILDSRMNTKYDENDKLIREVKVITLKSKLVSDFRKDFQFYKVREINNYHHAHDAYLNAVVGTALIKKYPKLESEFVYGDYKVYDVRKMIAKSEQEIGKATAKYFFYSNIMNFFKTEITLANGEIRKRPLIETNGETGEIVWDKGRDFATVRKVLSMPQVNIVKKTEVQTGGFSKESILPKRNSDKLIARKKDWDPKKYGGFDSPTVAYSVLVVAKVEKGKSKKLKSVKELLGITIMERSSFEKNPIDFLEAKGYKEVKKDLIIKLPKYSLFELENGRKRMLASAGELQKGNELALPSKYVNFLYLASHYEKLKGSPEDNEQKQLFVEQHKHYLDEIIEQISEFSKRVILADANLDKVLSAYNKHRDKPIREQAENIIHLFTLTNLGAPAAFKYFDTTIDRKRYTSTKEVLDATLIHQSITGLYETRIDLSQLGGDPKKKRKVSGSETPGTSESATPESTGMSSLPGCIGLDAATATVESEEIAELQQAVVEELGISMEELRHFIDEELEKMDCVQQRKKQLAELETWVIQKESEVAHVDQLFDDASRAVTNCESLVKDFYSKLGLQYRDSSSEDESSRPTEIIEIPDEDDDVLSIDSGDAGSRTPKDQKLREAMAALRKSAQDVQKFMDAVNKKSSSQDLHKGTLSQMSGELSKDGDLIVSMRILGKKRTKTWHKGTLIAIQTVGPGKKYKVKFDNKGKSLLSGNHIAYDYHPPADKLYVGSRVVAKYKDGNQVWLYAGIVAETPNVKNKLRFLIFFDDGYASYVTQSELYPICRPLKKTWEDIEDISCRDFIEEYVTAYPNRPMVLLKSGQLIKTEWEGTWWKSRVEEVDGSLVRILFLDDKRCEWIYRGSTRLEPMFSMKTSSASALEKKQGQLRTRPNMGAVRSKGPVVQYTQDLTGTGTQFKPVEPPQPTAPPAPPFPPAPPLSPQAGDSDLESQLAQSRKQVAKKSTSFRPGSVGSGHSSPTSPALSENVSGGKPGINQTYRSPLGSTASAPAPSALPAPPAPPVFHGMLERAPAEPSYRAPMEKLFYLPHVCSYTCLSRVRPMRNEQYRGKNPLLVPLLYDFRRMTARRRVNRKMGFHVIYKTPCGLCLRTMQEIERYLFETGCDFLFLEMFCLDPYVLVDRKFQPYKPFYYILDITYGKEDVPLSCVNEIDTTPPPQVAYSKERIPGKGVFINTGPEFLVGCDCKDGCRDKSKCACHQLTIQATACTPGGQINPNSGYQYKRLEECLPTGVYECNKRCKCDPNMCTNRLVQHGLQVRLQLFKTQNKGWGIRCLDDIAKGSFVCIYAGKILTDDFADKEGLEMGDEYFANLDHIESVENFKEGYESDAPCSSDSSGVDLKDQEDGNSGTEDPEESNDDSSDDNFCKDEDFSTSSVWRSYATRRQTRGQKENGLSETTSKDSHPPDLGPPHIPVPPSIPVGGCNPPSSEETPKNKVASWLSCNSVSEGGFADSDSHSSFKTNEGGEGRAGGSRMEAEKASTSGLGIKDEGDIKQAKKEDTDDRNKMSVVTESSRNYGYNPSPVKPEGLRRPPSKTSMHQSRRLMASAQSNPDDVLTLSSSTESEGESGTSRKPTAGQTSATAVDSDDIQTISSGSEGDDFEDKKNMTGPMKRQVAVKSTRGFALKSTHGIAIKSTNMASVDKGESAPVRKNTRQFYDGEESCYIIDAKLEGNLGRYLNHSCSPNLFVQNVFVDTHDLRFPWVAFFASKRIRAGTELTWDYNYEVGSVEGKELLCCCGAIECRGRLL

SEQ ID NO: 994 - protein, 2511 aa, synthetic construct
  REGION 1..2511: note = Description of Artificial Sequence: Synthetic polypeptide
MNHDQEFDPPKVYPPVPAEKRKPIRVLSLFDGIATGLLVLKDLGIQVDRYIASEVCEDSITVGMVRHQGKIMYVGDVRSVTQKHIQEWGPFDLVIGGSPCNDLSIVNPARKGLYEGTGRLFFEFYRLLHDARPKEGDDRPFFWLFENVVAMGVSDKRDISRFLESNPVMIDAKEVSAAHRARYFWGNLPGMNRPLASTVNDKLELQECLEHGRIAKFSKVRTITTRSNSIKQGKDQHFPVFMNEKEDILWCTEMERVFGFPVHYTDVSNMSRLARQRLLGRSWSVPVIRHLFAPLKEYFACVSSGNSNANSRGPSFSSGLVPLSLRGSHMGPMEIYKTVSAWKRQPVRVLSLFRNIDKVLKSLGFLESGSGSGGGTLKYVEDVTNVVRRDVEKWGPFDLVYGSTQPLGSSCDRCPGWYMFQFHRILQYALPRQESQRPFFWIFMDNLLLTEDDQETTTRFLQTEAVTLQDVRGRDYQNAMRVWSNIPGLKSKHAPLTPKEEEYLQAQVRSRSKLDAPKVDLLVKNCLLPLREYFKYFSQNSLPLGGPSSGAPPPSGGSPAGSPTSTEEGTSESATPESGPGTSTEPSEGSAPGSPAGSPTSTEEGTSTEPSEGSAPGTSTEPSEPKKKRKVYMDKKYSIGLAIGTNSVGWAVITDEYKVPSKKFKVLGNTDRHSIKKNLIGALLFDSGETAEATRLKRTARRRYTRRKNRICYLQEIFSNEMAKVDDSFFHRLEESFLVEEDKKHERHPIFGNIVDEVAYHEKYPTIYHLRKKLVDSTDKADLRLIYLALAHMIKFRGHFLIEGDLNPDNSDVDKLFIQLVQTYNQLFEENPINASGVDAKAILSARLSKSRRLENLIAQLPGEKKNGLFGNLIALSLGLTPNFKSNFDLAEDAKLQLSKDTYDDDLDNLLAQIGDQYADLFLAAKNLSDAILLSDILRVNTEITKAPLSASMIKRYDEHHQDLTLLKALVRQQLPEKYKEIFFDQSKNGYAGYIDGGASQEEFYKFIKPILEKMDGTEELLVKLNREDLLRKQRTFDNGSIPHQIHLGELHAILRRQEDFYPFLKDNREKIEKILTFRIPYYVGPLARGNSRFAWMTRKSEETITPWNFEEVVDKGASAQSFIERMTNFDKNLPNEKVLPKHSLLYEYFTVYNELTKVKYVTEGMRKPAFLSGEQKKAIVDLLFKTNRKVTVKQLKEDYFKKIECFDSVEISGVEDRFNASLGTYHDLLKIIKDKDFLDNEENEDILEDIVLTLTLFEDREMIEERLKTYAHLFDDKVMKQLKRRRYTGWGRLSRKLINGIRDKQSGKTILDFLKSDGFANRNFMQLIHDDSLTFKEDIQKAQVSGQGDSLHEHIANLAGSPAIKKGILQTVKVVDELVKVMGRHKPENIVIEMARENQTTQKGQKNSRERMKRIEEGIKELGSQILKEHPVENTQLQNEKLYLYYLQNGRDMYVDQELDINRLSDYDVDAIVPQSFLKDDSIDNKVLTRSDKNRGKSDNVPSEEVVKKMKNYWRQLLNAKLITQRKFDNLTKAERGGLSELDKAGFIKRQLVETRQITKHVAQILDSRMNTKYDENDKLIREVKVITLKSKLVSDFRKDFQFYKVREINNYHHAHDAYLNAVVGTALIKKYPKLESEFVYGDYKVYDVRKMIAKSEQEIGKATAKYFFYSNIMNFFKTEITLANGEIRKRPLIETNGETGEIVWDKGRDFATVRKVLSMPQVNIVKKTEVQTGGFSKESILPKRNSDKLIARKKDWDPKKYGGFDSPTVAYSVLVVAKVEKGKSKKLKSVKELLGITIMERSSFEKNPIDFLEAKGYKEVKKDLIIKLPKYSLFELENGRKRMLASAGELQKGNELALPSKYVNFLYLASHYEKLKGSPEDNEQKQLFVEQHKHYLDEIIEQISEFSKRVILADANLDKVLSAYNKHRDKPIREQAENIIHLFTLTNLGAPAAFKYFDTTIDRKRYTSTKEVLDATLIHQSITGLYETRIDLSQLGGDPKKKRKVSGSETPGTSESATPESTGMVAGMLGLREEKSEDQDLQGLKDKPLKFKKVKKDKKEEKEGKHEPVQPSAHHSAEPAEAGKAETSEGSGSAPAVPEASASPKQRRSIIRDRGPMYDDPTLPEGWTRKLKQRKSGRSAGKYDVYLINPQGKAFRSKVELIAYFEKVGDTSLDPNDFDFTVTGRGSPSRREQKPPKKPKSPKAPGTGRGRGRPKGSGTTRPKAATSEGVQVKRVLEKSPGKLLVKMPFQTSPGGKAEGGGATTSTQVMVIKRPGRKRKAEADPQAIPKKRGRKPGSVVAAAAAEAKKKAVKESSIRSVQETVLPIKKRKTRETVSIEVKEVVKPLLVSTLGEKSGKGLKTCKSPGRKSKESSPKGRSSSASSPPKKEHHHHHHHSESPKAPVPLLPPLPPPPPEPESSEDPTSPPEPQDLSSSVCKEEKMPRGGSLESDGCPKEPAKTQPAVATAATAAEKYKHRGEGERKDIVSSSMPRPNREEPVDSRTPVTERVS

SEQ ID NO: 995 - protein, 2860 aa, synthetic construct
  REGION 1..2860: note = Description of Artificial Sequence: Synthetic polypeptide
MNHDQEFDPPKVYPPVPAEKRKPIRVLSLFDGIATGLLVLKDLGIQVDRYIASEVCEDSITVGMVRHQGKIMYVGDVRSVTQKHIQEWGPFDLVIGGSPCNDLSIVNPARKGLYEGTGRLFFEFYRLLHDARPKEGDDRPFFWLFENVVAMGVSDKRDISRFLESNPVMIDAKEVSAAHRARYFWGNLPGMNRPLASTVNDKLELQECLEHGRIAKFSKVRTITTRSNSIKQGKDQHFPVFMNEKEDILWCTEMERVFGFPVHYTDVSNMSRLARQRLLGRSWSVPVIRHLFAPLKEYFACVSSGNSNANSRGPSFSSGLVPLSLRGSHMGPMEIYKTVSAWKRQPVRVLSLFRNIDKVLKSLGFLESGSGSGGGTLKYVEDVTNVVRRDVEKWGPFDLVYGSTQPLGSSCDRCPGWYMFQFHRILQYALPRQESQRPFFWIFMDNLLLTEDDQETTTRFLQTEAVTLQDVRGRDYQNAMRVWSNIPGLKSKHAPLTPKEEEYLQAQVRSRSKLDAPKVDLLVKNCLLPLREYFKYFSQNSLPLGGPSSGAPPPSGGSPAGSPTSTEEGTSESATPESGPGTSTEPSEGSAPGSPAGSPTSTEEGTSTEPSEGSAPGTSTEPSEPKKKRKVYMDKKYSIGLAIGTNSVGWAVITDEYKVPSKKFKVLGNTDRHSIKKNLIGALLFDSGETAEATRLKRTARRRYTRRKNRICYLQEIFSNEMAKVDDSFFHRLEESFLVEEDKKHERHPIFGNIVDEVAYHEKYPTIYHLRKKLVDSTDKADLRLIYLALAHMIKFRGHFLIEGDLNPDNSDVDKLFIQLVQTYNQLFEENPINASGVDAKAILSARLSKSRRLENLIAQLPGEKKNGLFGNLIALSLGLTPNFKSNFDLAEDAKLQLSKDTYDDDLDNLLAQIGDQYADLFLAAKNLSDAILLSDILRVNTEITKAPLSASMIKRYDEHHQDLTLLKALVRQQLPEKYKEIFFDQSKNGYAGYIDGGASQEEFYKFIKPILEKMDGTEELLVKLNREDLLRKQRTFDNGSIPHQIHLGELHAILRRQEDFYPFLKDNREKIEKILTFRIPYYVGPLARGNSRFAWMTRKSEETITPWNFEEVVDKGASAQSFIERMTNFDKNLPNEKVLPKHSLLYEYFTVYNELTKVKYVTEGMRKPAFLSGEQKKAIVDLLFKTNRKVTVKQLKEDYFKKIECFDSVEISGVEDRFNASLGTYHDLLKIIKDKDFLDNEENEDILEDIVLTLTLFEDREMIEERLKTYAHLFDDKVMKQLKRRRYTGWGRLSRKLINGIRDKQSGKTILDFLKSDGFANRNFMQLIHDDSLTFKEDIQKAQVSGQGDSLHEHIANLAGSPAIKKGILQTVKVVDELVKVMGRHKPENIVIEMARENQTTQKGQKNSRERMKRIEEGIKELGSQILKEHPVENTQLQNEKLYLYYLQNGRDMYVDQELDINRLSDYDVDAIVPQSFLKDDSIDNKVLTRSDKNRGKSDNVPSEEVVKKMKNYWRQLLNAKLITQRKFDNLTKAERGGLSELDKAGFIKRQLVETRQITKHVAQILDSRMNTKYDENDKLIREVKVITLKSKLVSDFRKDFQFYKVREINNYHHAHDAYLNAVVGTALIKKYPKLESEFVYGDYKVYDVRKMIAKSEQEIGKATAKYFFYSNIMNFFKTEITLANGEIRKRPLIETNGETGEIVWDKGRDFATVRKVLSMPQVNIVKKTEVQTGGFSKESILPKRNSDKLIARKKDWDPKKYGGFDSPTVAYSVLVVAKVEKGKSKKLKSVKELLGITIMERSSFEKNPIDFLEAKGYKEVKKDLIIKLPKYSLFELENGRKRMLASAGELQKGNELALPSKYVNFLYLASHYEKLKGSPEDNEQKQLFVEQHKHYLDEIIEQISEFSKRVILADANLDKVLSAYNKHRDKPIREQAENIIHLFTLTNLGAPAAFKYFDTTIDRKRYTSTKEVLDATLIHQSITGLYETRIDLSQLGGDPKKKRKVSGSETPGTSESATPESTGMAASAAAASAAAASAASGSPGPGEGSAGGEKRSTAPSAAASASASAAASSPAGGGAEALELLEHCGVCRERLRPEREPRLLPCLHSACSACLGPAAPAAANSSGDGGAAGDGTVVDCPVCKQQCFSKDIVENYFMRDSGSKAATDAQDANQCCTSCEDNAPATSYCVECSEPLCETCVEAHQRVKYTKDHTVRSTGPAKSRDGERTVYCNVHKHEPLVLFCESCDTLTCRDCQLNAHKDHQYQFLEDAVRNQRKLLASLVKRLGDKHATLQKSTKEVRSSIRQVSDVQKRVQVDVKMAILQIMKELNKRGRVLVNDAQKVTEGQQERLERQHWTMTKIQKHQEHILRFASWALESDNNTALLLSKKLIYFQLHRALKMIVDPVEPHGEMKFQWDLNAWTKSAEAFGKIVAERPGTNSTGPAPMAPPRAPGPLSKQGSGSSQPMEVQEGYGFGSGDDPYSSAEPHVSGVKRSRSGEGEVSGLMRKVPRVSLERLDLDLTADSQPPVFKVFPGSTTEDYNLIVIERGAAAAATGQPGTAPAGTPGAPPLAGMAIVKEEETEAAIGAPPTATEGPETKPVLMALAEGPGAEGPRLASPSGSTSSGLEVVAPEGTSAPGGGPGTLDDSATICRVCQKPGDLVMCNQCEFCFHLDCHLPALQDVPGEEWSCSLCHVLPDLKEEDGSLSLDGADSTGVVAKLSPANQRKCERVLLALFCHEPCRPLHQLATDSTFSLDQPGGTLDLTLIRARLQEKLSPPYSSPQEFAQDVGRMFKQFNKLTEDKADVQSIIGLQRFFETRMNEAFGDTKFSAVLVEPPPMSLPGAGLSSQELSGGPGDGP

SEQ ID NO: 996 - protein, 2216 aa, synthetic construct
  REGION 1..2216: note = Description of Artificial Sequence: Synthetic polypeptide
MNHDQEFDPPKVYPPVPAEKRKPIRVLSLFDGIATGLLVLKDLGIQVDRYIASEVCEDSITVGMVRHQGKIMYVGDVRSVTQKHIQEWGPFDLVIGGSPCNDLSIVNPARKGLYEGTGRLFFEFYRLLHDARPKEGDDRPFFWLFENVVAMGVSDKRDISRFLESNPVMIDAKEVSAAHRARYFWGNLPGMNRPLASTVNDKLELQECLEHGRIAKFSKVRTITTRSNSIKQGKDQHFPVFMNEKEDILWCTEMERVFGFPVHYTDVSNMSRLARQRLLGRSWSVPVIRHLFAPLKEYFACVSSGNSNANSRGPSFSSGLVPLSLRGSHMGPMEIYKTVSAWKRQPVRVLSLFRNIDKVLKSLGFLESGSGSGGGTLKYVEDVTNVVRRDVEKWGPFDLVYGSTQPLGSSCDRCPGWYMFQFHRILQYALPRQESQRPFFWIFMDNLLLTEDDQETTTRFLQTEAVTLQDVRGRDYQNAMRVWSNIPGLKSKHAPLTPKEEEYLQAQVRSRSKLDAPKVDLLVKNCLLPLREYFKYFSQNSLPLGGPSSGAPPPSGGSPAGSPTSTEEGTSESATPESGPGTSTEPSEGSAPGSPAGSPTSTEEGTSTEPSEGSAPGTSTEPSEPKKKRKVYMDKKYSIGLAIGTNSVGWAVITDEYKVPSKKFKVLGNTDRHSIKKNLIGALLFDSGETAEATRLKRTARRRYTRRKNRICYLQEIFSNEMAKVDDSFFHRLEESFLVEEDKKHERHPIFGNIVDEVAYHEKYPTIYHLRKKLVDSTDKADLRLIYLALAHMIKFRGHFLIEGDLNPDNSDVDKLFIQLVQTYNQLFEENPINASGVDAKAILSARLSKSRRLENLIAQLPGEKKNGLFGNLIALSLGLTPNFKSNFDLAEDAKLQLSKDTYDDDLDNLLAQIGDQYADLFLAAKNLSDAILLSDILRVNTEITKAPLSASMIKRYDEHHQDLTLLKALVRQQLPEKYKEIFFDQSKNGYAGYIDGGASQEEFYKFIKPILEKMDGTEELLVKLNREDLLRKQRTFDNGSIPHQIHLGELHAILRRQEDFYPFLKDNREKIEKILTFRIPYYVGPLARGNSRFAWMTRKSEETITPWNFEEVVDKGASAQSFIERMTNFDKNLPNEKVLPKHSLLYEYFTVYNELTKVKYVTEGMRKPAFLSGEQKKAIVDLLFKTNRKVTVKQLKEDYFKKIECFDSVEISGVEDRFNASLGTYHDLLKIIKDKDFLDNEENEDILEDIVLTLTLFEDREMIEERLKTYAHLFDDKVMKQLKRRRYTGWGRLSRKLINGIRDKQSGKTILDFLKSDGFANRNFMQLIHDDSLTFKEDIQKAQVSGQGDSLHEHIANLAGSPAIKKGILQTVKVVDELVKVMGRHKPENIVIEMARENQTTQKGQKNSRERMKRIEEGIKELGSQILKEHPVENTQLQNEKLYLYYLQNGRDMYVDQELDINRLSDYDVDAIVPQSFLKDDSIDNKVLTRSDKNRGKSDNVPSEEVVKKMKNYWRQLLNAKLITQRKFDNLTKAERGGLSELDKAGFIKRQLVETRQITKHVAQILDSRMNTKYDENDKLIREVKVITLKSKLVSDFRKDFQFYKVREINNYHHAHDAYLNAVVGTALIKKYPKLESEFVYGDYKVYDVRKMIAKSEQEIGKATAKYFFYSNIMNFFKTEITLANGEIRKRPLIETNGETGEIVWDKGRDFATVRKVLSMPQVNIVKKTEVQTGGFSKESILPKRNSDKLIARKKDWDPKKYGGFDSPTVAYSVLVVAKVEKGKSKKLKSVKELLGITIMERSSFEKNPIDFLEAKGYKEVKKDLIIKLPKYSLFELENGRKRMLASAGELQKGNELALPSKYVNFLYLASHYEKLKGSPEDNEQKQLFVEQHKHYLDEIIEQISEFSKRVILADANLDKVLSAYNKHRDKPIREQAENIIHLFTLTNLGAPAAFKYFDTTIDRKRYTSTKEVLDATLIHQSITGLYETRIDLSQLGGDPKKKRKVSGSETPGTSESATPESTGMGKKTKRTADSSSSEDEEEYVVEKVLDRRVVKGQVEYLLKWKGFSEEHNTWEPEKNLDCPELISEFMKKYKKMKEGENNKPREKSESNKRKSNFSNSADDIKSKKKREQSNDIARGFERGLEPEKIIGATDSCGDLMFLMKWKGTDEADLVLAKEANVKCPQIVIAFYEERLTWHAYPEDAENKEKETAKS

SEQ ID NO: 997 - protein, 2466 aa, synthetic construct
  REGION 1..2466: note = Description of Artificial Sequence: Synthetic polypeptide
MNHDQEFDPPKVYPPVPAEKRKPIRVLSLFDGIATGLLVLKDLGIQVDRYIASEVCEDSITVGMVRHQGKIMYVGDVRSVTQKHIQEWGPFDLVIGGSPCNDLSIVNPARKGLYEGTGRLFFEFYRLLHDARPKEGDDRPFFWLFENVVAMGVSDKRDISRFLESNPVMIDAKEVSAAHRARYFWGNLPGMNRPLASTVNDKLELQECLEHGRIAKFSKVRTITTRSNSIKQGKDQHFPVFMNEKEDILWCTEMERVFGFPVHYTDVSNMSRLARQRLLGRSWSVPVIRHLFAPLKEYFACVSSGNSNANSRGPSFSSGLVPLSLRGSHMGPMEIYKTVSAWKRQPVRVLSLFRNIDKVLKSLGFLESGSGSGGGTLKYVEDVTNVVRRDVEKWGPFDLVYGSTQPLGSSCDRCPGWYMFQFHRILQYALPRQESQRPFFWIFMDNLLLTEDDQETTTRFLQTEAVTLQDVRGRDYQNAMRVWSNIPGLKSKHAPLTPKEEEYLQAQVRSRSKLDAPKVDLLVKNCLLPLREYFKYFSQNSLPLGGPSSGAPPPSGGSPAGSPTSTEEGTSESATPESGPGTSTEPSEGSAPGSPAGSPTSTEEGTSTEPSEGSAPGTSTEPSEPKKKRKVYMDKKYSIGLAIGTNSVGWAVITDEYKVPSKKFKVLGNTDRHSIKKNLIGALLFDSGETAEATRLKRTARRRYTRRKNRICYLQEIFSNEMAKVDDSFFHRLEESFLVEEDKKHERHPIFGNIVDEVAYHEKYPTIYHLRKKLVDSTDKADLRLIYLALAHMIKFRGHFLIEGDLNPDNSDVDKLFIQLVQTYNQLFEENPINASGVDAKAILSARLSKSRRLENLIAQLPGEKKNGLFGNLIALSLGLTPNFKSNFDLAEDAKLQLSKDTYDDDLDNLLAQIGDQYADLFLAAKNLSDAILLSDILRVNTEITKAPLSASMIKRYDEHHQDLTLLKALVRQQLPEKYKEIFFDQSKNGYAGYIDGGASQEEFYKFIKPILEKMDGTEELLVKLNREDLLRKQRTFDNGSIPHQIHLGELHAILRRQEDFYPFLKDNREKIEKILTFRIPYYVGPLARGNSRFAWMTRKSEETITPWNFEEVVDKGASAQSFIERMTNFDKNLPNEKVLPKHSLLYEYFTVYNELTKVKYVTEGMRKPAFLSGEQKKAIVDLLFKTNRKVTVKQLKEDYFKKIECFDSVEISGVEDRFNASLGTYHDLLKIIKDKDFLDNEENEDILEDIVLTLTLFEDREMIEERLKTYAHLFDDKVMKQLKRRRYTGWGRLSRKLINGIRDKQSGKTILDFLKSDGFANRNFMQLIHDDSLTFKEDIQKAQVSGQGDSLHEHIANLAGSPAIKKGILQTVKVVDELVKVMGRHKPENIVIEMARENQTTQKGQKNSRERMKRIEEGIKELGSQILKEHPVENTQLQNEKLYLYYLQNGRDMYVDQELDINRLSDYDVDAIVPQSFLKDDSIDNKVLTRSDKNRGKSDNVPSEEVVKKMKNYWRQLLNAKLITQRKFDNLTKAERGGLSELDKAGFIKRQLVETRQITKHVAQILDSRMNTKYDENDKLIREVKVITLKSKLVSDFRKDFQFYKVREINNYHHAHDAYLNAVVGTALIKKYPKLESEFVYGDYKVYDVRKMIAKSEQEIGKATAKYFFYSNIMNFFKTEITLANGEIRKRPLIETNGETGEIVWDKGRDFATVRKVLSMPQVNIVKKTEVQTGGFSKESILPKRNSDKLIARKKDWDPKKYGGFDSPTVAYSVLVVAKVEKGKSKKLKSVKELLGITIMERSSFEKNPIDFLEAKGYKEVKKDLIIKLPKYSLFELENGRKRMLASAGELQKGNELALPSKYVNFLYLASHYEKLKGSPEDNEQKQLFVEQHKHYLDEIIEQISEFSKRVILADANLDKVLSAYNKHRDKPIREQAENIIHLFTLTNLGAPAAFKYFDTTIDRKRYTSTKEVLDATLIHQSITGLYETRIDLSQLGGDPKKKRKVSGSETPGTSESATPESTGMSEREVSTAPAGTDMPAAKKQKLSSDENSNPDLSGDENDDAVSIESGTNTERPDTPTNTPNAPGRKSWGKGKWKSKKCKYSFKCVNSLKEDHNQPLFGVQFNWHSKEGDPLVFATVGSNRVTLYECHSQGEIRLLQSYVDADADENFYTCAWTYDSNTSHPLLAVAGSRGIIRIINPITMQCIKHYVGHGNAINELKFHPRDPNLLLSVSKDHALRLWNIQTDTLVAIFGGVEGHRDEVLSADYDLLGEKIMSCGMDHSLKLWRINSKRMMNAIKESYDYNPNKTNRPFISQKIHFPDFSTRDIHRNYVDCVRWLGDLILSKSCENAIVCWKPGKMEDDIDKIKPSESNVTILGRFDYSQCDIWYMRFSMDFWQKMLALGNQVGKLYVWDLEVEDPHKAKCTTLTHHKCGAAIRQTSFSRDSSILIAVCDDASIWRWDRLR

SEQ ID NO: 998 - protein, 2450 aa, synthetic construct
  REGION 1..2450: note = Description of Artificial Sequence: Synthetic polypeptide
MNHDQEFDPPKVYPPVPAEKRKPIRVLSLFDGIATGLLVLKDLGIQVDRYIASEVCEDSITVGMVRHQGKIMYVGDVRSVTQKHIQEWGPFDLVIGGSPCNDLSIVNPARKGLYEGTGRLFFEFYRLLHDARPKEGDDRPFFWLFENVVAMGVSDKRDISRFLESNPVMIDAKEVSAAHRARYFWGNLPGMNRPLASTVNDKLELQECLEHGRIAKFSKVRTITTRSNSIKQGKDQHFPVFMNEKEDILWCTEMERVFGFPVHYTDVSNMSRLARQRLLGRSWSVPVIRHLFAPLKEYFACVSSGNSNANSRGPSFSSGLVPLSLRGSHMGPMEIYKTVSAWKRQPVRVLSLFRNIDKVLKSLGFLESGSGSGGGTLKYVEDVTNVVRRDVEKWGPFDLVYGSTQPLGSSCDRCPGWYMFQFHRILQYALPRQESQRPFFWIFMDNLLLTEDDQETTTRFLQTEAVTLQDVRGRDYQNAMRVWSNIPGLKSKHAPLTPKEEEYLQAQVRSRSKLDAPKVDLLVKNCLLPLREYFKYFSQNSLPLGGPSSGAPPPSGGSPAGSPTSTEEGTSESATPESGPGTSTEPSEGSAPGSPAGSPTSTEEGTSTEPSEGSAPGTSTEPSEPKKKRKVYMDKKYSIGLAIGTNSVGWAVITDEYKVPSKKFKVLGNTDRHSIKKNLIGALLFDSGETAEATRLKRTARRRYTRRKNRICYLQEIFSNEMAKVDDSFFHRLEESFLVEEDKKHERHPIFGNIVDEVAYHEKYPTIYHLRKKLVDSTDKADLRLIYLALAHMIKFRGHFLIEGDLNPDNSDVDKLFIQLVQTYNQLFEENPINASGVDAKAILSARLSKSRRLENLIAQLPGEKKNGLFGNLIALSLGLTPNFKSNFDLAEDAKLQLSKDTYDDDLDNLLAQIGDQYADLFLAAKNLSDAILLSDILRVNTEITKAPLSASMIKRYDEHHQDLTLLKALVRQQLPEKYKEIFFDQSKNGYAGYIDGGASQEEFYKFIKPILEKMDGTEELLVKLNREDLLRKQRTFDNGSIPHQIHLGELHAILRRQEDFYPFLKDNREKIEKILTFRIPYYVGPLARGNSRFAWMTRKSEETITPWNFEEVVDKGASAQSFIERMTNFDKNLPNEKVLPKHSLLYEYFTVYNELTKVKYVTEGMRKPAFLSGEQKKAIVDLLFKTNRKVTVKQLKEDYFKKIECFDSVEISGVEDRFNASLGTYHDLLKIIKDKDFLDNEENEDILEDIVLTLTLFEDREMIEERLKTYAHLFDDKVMKQLKRRRYTGWGRLSRKLINGIRDKQSGKTILDFLKSDGFANRNFMQLIHDDSLTFKEDIQKAQVSGQGDSLHEHIANLAGSPAIKKGILQTVKVVDELVKVMGRHKPENIVIEMARENQTTQKGQKNSRERMKRIEEGIKELGSQILKEHPVENTQLQNEKLYLYYLQNGRDMYVDQELDINRLSDYDVDAIVPQSFLKDDSIDNKVLTRSDKNRGKSDNVPSEEVVKKMKNYWRQLLNAKLITQRKFDNLTKAERGGLSELDKAGFIKRQLVETRQITKHVAQILDSRMNTKYDENDKLIREVKVITLKSKLVSDFRKDFQFYKVREINNYHHAHDAYLNAVVGTALIKKYPKLESEFVYGDYKVYDVRKMIAKSEQEIGKATAKYFFYSNIMNFFKTEITLANGEIRKRPLIETNGETGEIVWDKGRDFATVRKVLSMPQVNIVKKTEVQTGGFSKESILPKRNSDKLIARKKDWDPKKYGGFDSPTVAYSVLVVAKVEKGKSKKLKSVKELLGITIMERSSFEKNPIDFLEAKGYKEVKKDLIIKLPKYSLFELENGRKRMLASAGELQKGNELALPSKYVNFLYLASHYEKLKGSPEDNEQKQLFVEQHKHYLDEIIEQISEFSKRVILADANLDKVLSAYNKHRDKPIREQAENIIHLFTLTNLGAPAAFKYFDTTIDRKRYTSTKEVLDATLIHQSITGLYETRIDLSQLGGDPKKKRKVSGSETPGTSESATPESTGMADKEAAFDDAVEERVINEEYKIWKKNTPFLYDLVMTHALEWPSLTAQWLPDVTRPEGKDFSIHRLVLGTHTSDEQNHLVIASVQLPNDDAQFDASHYDSEKGEFGGFGSVSGKIEIEIKINHEGEVNRARYMPQNPCIIATKTPSSDVLVFDYTKHPSKPDPSGECNPDLRLRGHQKEGYGLSWNPNLSGHLLSASDDHTICLWDISAVPKEGKVVDAKTIFTGHTAVVEDVSWHLLHESLFGSVADDQKLMIWDTRSNNTSKPSHSVDAHTAEVNCLSFNPYSEFILATGSADKTVALWDLRNLKLKLHSFESHKDEIFQVQWSPHNETILASSGTDRRLNVWDLSKIGEEQSPEDAEDGPPELLFIHGGHTAKISDFSWNPNEPWVICSVSEDNIMQVWQMAENIYNDEDPEGSVDPEGQGS

SEQ ID NO: 999 - protein, 2510 aa, synthetic construct
  REGION 1..2510: note = Description of Artificial Sequence: Synthetic polypeptide
MNHDQEFDPPKVYPPVPAEKRKPIRVLSLFDGIATGLLVLKDLGIQVDRYIASEVCEDSITVGMVRHQGKIMYVGDVRSVTQKHIQEWGPFDLVIGGSPCNDLSIVNPARKGLYEGTGRLFFEFYRLLHDARPKEGDDRPFFWLFENVVAMGVSDKRDISRFLESNPVMIDAKEVSAAHRARYFWGNLPGMNRPLASTVNDKLELQECLEHGRIAKFSKVRTITTRSNSIKQGKDQHFPVFMNEKEDILWCTEMERVFGFPVHYTDVSNMSRLARQRLLGRSWSVPVIRHLFAPLKEYFACVSSGNSNANSRGPSFSSGLVPLSLRGSHMGPMEIYKTVSAWKRQPVRVLSLFRNIDKVLKSLGFLESGSGSGGGTLKYVEDVTNVVRRDVEKWGPFDLVYGSTQPLGSSCDRCPGWYMFQFHRILQYALPRQESQRPFFWIFMDNLLLTEDDQETTTRFLQTEAVTLQDVRGRDYQNAMRVWSNIPGLKSKHAPLTPKEEEYLQAQVRSRSKLDAPKVDLLVKNCLLPLREYFKYFSQNSLPLGGPSSGAPPPSGGSPAGSPTSTEEGTSESATPESGPGTSTEPSEGSAPGSPAGSPTSTEEGTSTEPSEGSAPGTSTEPSEPKKKRKVYMDKKYSIGLAIGTNSVGWAVITDEYKVPSKKFKVLGNTDRHSIKKNLIGALLFDSGETAEATRLKRTARRRYTRRKNRICYLQEIFSNEMAKVDDSFFHRLEESFLVEEDKKHERHPIFGNIVDEVAYHEKYPTIYHLRKKLVDSTDKADLRLIYLALAHMIKFRGHFLIEGDLNPDNSDVDKLFIQLVQTYNQLFEENPINASGVDAKAILSARLSKSRRLENLIAQLPGEKKNGLFGNLIALSLGLTPNFKSNFDLAEDAKLQLSKDTYDDDLDNLLAQIGDQYADLFLAAKNLSDAILLSDILRVNTEITKAPLSASMIKRYDEHHQDLTLLKALVRQQLPEKYKEIFFDQSKNGYAGYIDGGASQEEFYKFIKPILEKMDGTEELLVKLNREDLLRKQRTFDNGSIPHQIHLGELHAILRRQEDFYPFLKDNREKIEKILTFRIPYYVGPLARGNSRFAWMTRKSEETITPWNFEEVVDKGASAQSFIERMTNFDKNLPNEKVLPKHSLLYEYFTVYNELTKVKYVTEGMRKPAFLSGEQKKAIVDLLFKTNRKVTVKQLKEDYFKKIECFDSVEISGVEDRFNASLGTYHDLLKIIKDKDFLDNEENEDILEDIVLTLTLFEDREMIEERLKTYAHLFDDKVMKQLKRRRYTGWGRLSRKLINGIRDKQSGKTILDFLKSDGFANRNFMQLIHDDSLTFKEDIQKAQVSGQGDSLHEHIANLAGSPAIKKGILQTVKVVDELVKVMGRHKPENIVIEMARENQTTQKGQKNSRERMKRIEEGIKELGSQILKEHPVENTQLQNEKLYLYYLQNGRDMYVDQELDINRLSDYDVDAIVPQSFLKDDSIDNKVLTRSDKNRGKSDNVPSEEVVKKMKNYWRQLLNAKLITQRKFDNLTKAERGGLSELDKAGFIKRQLVETRQITKHVAQILDSRMNTKYDENDKLIREVKVITLKSKLVSDFRKDFQFYKVREINNYHHAHDAYLNAVVGTALIKKYPKLESEFVYGDYKVYDVRKMIAKSEQEIGKATAKYFFYSNIMNFFKTEITLANGEIRKRPLIETNGETGEIVWDKGRDFATVRKVLSMPQVNIVKKTEVQTGGFSKESILPKRNSDKLIARKKDWDPKKYGGFDSPTVAYSVLVVAKVEKGKSKKLKSVKELLGITIMERSSFEKNPIDFLEAKGYKEVKKDLIIKLPKYSLFELENGRKRMLASAGELQKGNELALPSKYVNFLYLASHYEKLKGSPEDNEQKQLFVEQHKHYLDEIIEQISEFSKRVILADANLDKVLSAYNKHRDKPIREQAENIIHLFTLTNLGAPAAFKYFDTTIDRKRYTSTKEVLDATLIHQSITGLYETRIDLSQLGGDPKKKRKVSGSETPGTSESATPESTGMPAMVEKGPEVSGKRRGRNNAAASASAAAASAAASAACASPAATAASGAAASSASAAAASAAAAPNNGQNKSLAAAAPNGNSSSNSWEEGSSGSSSDEEHGGGGMRVGPQYQAVVPDFDPAKLARRSQERDNLGMLVWSPNQNLSEAKLDEYIAIAKEKHGYNMEQALGMLFWHKHNIEKSLADLPNFTPFPDEWTVEDKVLFEQAFSFHGKTFHRIQQMLPDKSIASLVKFYYSWKKTRTKTSVMDRHARKQKREREESEDELEEANGNNPIDIEVDQNKESKKEVPPTETVPQVKKEKHSTQAKNRAKRKPPKGMFLSQEDVEAVSANATAATTVLRQLDMELVSVKRQIQNIKQTNSALKEKLDGGIEPYRLPEVIQKCNARWTTEEQLLAVQAIRKYGRDFQAISDVIGNKSVVQVKNFFVNYRRRFNIDEVLQEWEAEHGKEETNGPSNQKPVKSPDNSIKMPEEEDEAPVLDVRYASAS

SEQ ID NO: 1000 - protein, 2771 aa, synthetic construct
  REGION 1..2771: note = Description of Artificial Sequence: Synthetic polypeptide
MNHDQEFDPPKVYPPVPAEKRKPIRVLSLFDGIATGLLVLKDLGIQVDRYIASEVCEDSITVGMVRHQGKIMYVGDVRSVTQKHIQEWGPFDLVIGGSPCNDLSIVNPARKGLYEGTGRLFFEFYRLLHDARPKEGDDRPFFWLFENVVAMGVSDKRDISRFLESNPVMIDAKEVSAAHRARYFWGNLPGMNRPLASTVNDKLELQECLEHGRIAKFSKVRTITTRSNSIKQGKDQHFPVFMNEKEDILWCTEMERVFGFPVHYTDVSNMSRLARQRLLGRSWSVPVIRHLFAPLKEYFACVSSGNSNANSRGPSFSSGLVPLSLRGSHMGPMEIYKTVSAWKRQPVRVLSLFRNIDKVLKSLGFLESGSGSGGGTLKYVEDVTNVVRRDVEKWGPFDLVYGSTQPLGSSCDRCPGWYMFQFHRILQYALPRQESQRPFFWIFMDNLLLTEDDQETTTRFLQTEAVTLQDVRGRDYQNAMRVWSNIPGLKSKHAPLTPKEEEYLQAQVRSRSKLDAPKVDLLVKNCLLPLREYFKYFSQNSLPLGGPSSGAPPPSGGSPAGSPTSTEEGTSESATPESGPGTSTEPSEGSAPGSPAGSPTSTEEGTSTEPSEGSAPGTSTEPSEPKKKRKVYMDKKYSIGLAIGTNSVGWAVITDEYKVPSKKFKVLGNTDRHSIKKNLIGALLFDSGETAEATRLKRTARRRYTRRKNRICYLQEIFSNEMAKVDDSFFHRLEESFLVEEDKKHERHPIFGNIVDEVAYHEKYPTIYHLRKKLVDSTDKADLRLIYLALAHMIKFRGHFLIEGDLNPDNSDVDKLFIQLVQTYNQLFEENPINASGVDAKAILSARLSKSRRLENLIAQLPGEKKNGLFGNLIALSLGLTPNFKSNFDLAEDAKLQLSKDTYDDDLDNLLAQIGDQYADLFLAAKNLSDAILLSDILRVNTEITKAPLSASMIKRYDEHHQDLTLLKALVRQQLPEKYKEIFFDQSKNGYAGYIDGGASQEEFYKFIKPILEKMDGTEELLVKLNREDLLRKQRTFDNGSIPHQIHLGELHAILRRQEDFYPFLKDNREKIEKILTFRIPYYVGPLARGNSRFAWMTRKSEETITPWNFEEVVDKGASAQSFIERMTNFDKNLPNEKVLPKHSLLYEYFTVYNELTKVKYVTEGMRKPAFLSGEQKKAIVDLLFKTNRKVTVKQLKEDYFKKIECFDSVEISGVEDRFNASLGTYHDLLKIIKDKDFLDNEENEDILEDIVLTLTLFEDREMIEERLKTYAHLFDDKVMKQLKRRRYTGWGRLSRKLINGIRDKQSGKTILDFLKSDGFANRNFMQLIHDDSLTFKEDIQKAQVSGQGDSLHEHIANLAGSPAIKKGILQTVKVVDELVKVMGRHKPENIVIEMARENQTTQKGQKNSRERMKRIEEGIKELGSQILKEHPVENTQLQNEKLYLYYLQNGRDMYVDQELDINRLSDYDVDAIVPQSFLKDDSIDNKVLTRSDKNRGKSDNVPSEEVVKKMKNYWRQLLNAKLITQRKFDNLTKAERGGLSELDKAGFIKRQLVETRQITKHVAQILDSRMNTKYDENDKLIREVKVITLKSKLVSDFRKDFQFYKVREINNYHHAHDAYLNAVVGTALIKKYPKLESEFVYGDYKVYDVRKMIAKSEQEIGKATAKYFFYSNIMNFFKTEITLANGEIRKRPLIETNGETGEIVWDKGRDFATVRKVLSMPQVNIVKKTEVQTGGFSKESILPKRNSDKLIARKKDWDPKKYGGFDSPTVAYSVLVVAKVEKGKSKKLKSVKELLGITIMERSSFEKNPIDFLEAKGYKEVKKDLIIKLPKYSLFELENGRKRMLASAGELQKGNELALPSKYVNFLYLASHYEKLKGSPEDNEQKQLFVEQHKHYLDEIIEQISEFSKRVILADANLDKVLSAYNKHRDKPIREQAENIIHLFTLTNLGAPAAFKYFDTTIDRKRYTSTKEVLDATLIHQSITGLYETRIDLSQLGGDPKKKRKVSGSETPGTSESATPESTGMGQTGKKSEKGPVCWRKRVKSEYMRLRQLKRFRRADEVKSMFSSNRQKILERTEILNQEWKQRRIQPVHILTSVSSLRGTRECSVTSDLDFPTQVIPLKTLNAVASVPIMYSWSPLQQNFMVEDETVLHNIPYMGDEVLDQDGTFIEELIKNYDGKVHGDRECGFINDEIFVELVNALGQYNDDDDDDDGDDPEEREEKQKDLEDHRDDKESRPPRKFPSDKIFEAISSMFPDKGTAEELKEKYKELTEQQLPGALPPECTPNIDGPNAKSVQREQSLHSFHTLFCRRCFKYDCFLHPFHATPNTYKRKNTETALDNKPCGPQCYQHLEGAKEFAAALTAERIKTPPKRPGGRRRGRLPNNSSRPSTPTINVLESKDTDSDREAGTETGGENNDKEEEEKKDETSSSSEANSRCQTPIKMKPNIEPPENVEWSGAEASMFRVLIGTYYDNFCAIARLIGTKTCRQVYEFRVKESSIIAPAPAEDVDTPPRKKKRKHRLWAAHCRKIQLKKDGSSNHVYNYQPCDHPRQPCDSSCPCVIAQNFCEKFCQCSSECQNRFPGCRCKAQCNTKQCPCYLAVRECDPDLCLTCGAADHWDSKNVSCKNCSIQRGSKKHLLLAPSDVAGWGIFIKDPVQKNEFISEYCGEIISQDEADRRGKVYDKYMCSFLFNLNNDFVVDATRKGNKIRFANHSVNPNCYAKVMMVNGDHRIGIFAKRAIQTGEELFFDYRYSQADALKYVGIEREMEIP

SEQ ID NO: 1001 - protein, 2207 aa, synthetic construct
  REGION 1..2207: note = Description of Artificial Sequence: Synthetic polypeptide
MNHDQEFDPPKVYPPVPAEKRKPIRVLSLFDGIATGLLVLKDLGIQVDRYIASEVCEDSITVGMVRHQGKIMYVGDVRSVTQKHIQEWGPFDLVIGGSPCNDLSIVNPARKGLYEGTGRLFFEFYRLLHDARPKEGDDRPFFWLFENVVAMGVSDKRDISRFLESNPVMIDAKEVSAAHRARYFWGNLPGMNRPLASTVNDKLELQECLEHGRIAKFSKVRTITTRSNSIKQGKDQHFPVFMNEKEDILWCTEMERVFGFPVHYTDVSNMSRLARQRLLGRSWSVPVIRHLFAPLKEYFACVSSGNSNANSRGPSFSSGLVPLSLRGSHMGPMEIYKTVSAWKRQPVRVLSLFRNIDKVLKSLGFLESGSGSGGGTLKYVEDVTNVVRRDVEKWGPFDLVYGSTQPLGSSCDRCPGWYMFQFHRILQYALPRQESQRPFFWIFMDNLLLTEDDQETTTRFLQTEAVTLQDVRGRDYQNAMRVWSNIPGLKSKHAPLTPKEEEYLQAQVRSRSKLDAPKVDLLVKNCLLPLREYFKYFSQNSLPLGGPSSGAPPPSGGSPAGSPTSTEEGTSESATPESGPGTSTEPSEGSAPGSPAGSPTSTEEGTSTEPSEGSAPGTSTEPSEPKKKRKVYMDKKYSIGLAIGTNSVGWAVITDEYKVPSKKFKVLGNTDRHSIKKNLIGALLFDSGETAEATRLKRTARRRYTRRKNRICYLQEIFSNEMAKVDDSFFHRLEESFLVEEDKKHERHPIFGNIVDEVAYHEKYPTIYHLRKKLVDSTDKADLRLIYLALAHMIKFRGHFLIEGDLNPDNSDVDKLFIQLVQTYNQLFEENPINASGVDAKAILSARLSKSRRLENLIAQLPGEKKNGLFGNLIALSLGLTPNFKSNFDLAEDAKLQLSKDTYDDDLDNLLAQIGDQYADLFLAAKNLSDAILLSDILRVNTEITKAPLSASMIKRYDEHHQDLTLLKALVRQQLPEKYKEIFFDQSKNGYAGYIDGGASQEEFYKFIKPILEKMDGTEELLVKLNREDLLRKQRTFDNGSIPHQIHLGELHAILRRQEDFYPFLKDNREKIEKILTFRIPYYVGPLARGNSRFAWMTRKSEETITPWNFEEVVDKGASAQSFIERMTNFDKNLPNEKVLPKHSLLYEYFTVYNELTKVKYVTEGMRKPAFLSGEQKKAIVDLLFKTNRKVTVKQLKEDYFKKIECFDSVEISGVEDRFNASLGTYHDLLKIIKDKDFLDNEENEDILEDIVLTLTLFEDREMIEERLKTYAHLFDDKVMKQLKRRRYTGWGRLSRKLINGIRDKQSGKTILDFLKSDGFANRNFMQLIHDDSLTFKEDIQKAQVSGQGDSLHEHIANLAGSPAIKKGILQTVKVVDELVKVMGRHKPENIVIEMARENQTTQKGQKNSRERMKRIEEGIKELGSQILKEHPVENTQLQNEKLYLYYLQNGRDMYVDQELDINRLSDYDVDAIVPQSFLKDDSIDNKVLTRSDKNRGKSDNVPSEEVVKKMKNYWRQLLNAKLITQRKFDNLTKAERGGLSELDKAGFIKRQLVETRQITKHVAQILDSRMNTKYDENDKLIREVKVITLKSKLVSDFRKDFQFYKVREINNYHHAHDAYLNAVVGTALIKKYPKLESEFVYGDYKVYDVRKMIAKSEQEIGKATAKYFFYSNIMNFFKTEITLANGEIRKRPLIETNGETGEIVWDKGRDFATVRKVLSMPQVNIVKKTEVQTGGFSKESILPKRNSDKLIARKKDWDPKKYGGFDSPTVAYSVLVVAKVEKGKSKKLKSVKELLGITIMERSSFEKNPIDFLEAKGYKEVKKDLIIKLPKYSLFELENGRKRMLASAGELQKGNELALPSKYVNFLYLASHYEKLKGSPEDNEQKQLFVEQHKHYLDEIIEQISEFSKRVILADANLDKVLSAYNKHRDKPIREQAENIIHLFTLTNLGAPAAFKYFDTTIDRKRYTSTKEVLDATLIHQSITGLYETRIDLSQLGGDPKKKRKVSGSETPGTSESATPESTGRTLVTFKDVFVDFTREEWKLLDTAQQIVYRNVMLENYKNLVSLGYQLTKPDVILRLEKGEEPSTEPSEGSAPGTSTEPSETGMNNSQGRVTFEDVTVNFTQGEWQRLNPEQRNLYRDVMLENYSNLVSVGQGETTKPDVILRLEQGKEPWLEEEEVLGSGRAEKNGDIGGQIWKPKDVKESL

SEQ ID NO: 1002 - protein, 2187 aa, synthetic construct
  REGION 1..2187: note = Description of Artificial Sequence: Synthetic polypeptide
MNHDQEFDPPKVYPPVPAEKRKPIRVLSLFDGIATGLLVLKDLGIQVDRYIASEVCEDSITVGMVRHQGKIMYVGDVRSVTQKHIQEWGPFDLVIGGSPCNDLSIVNPARKGLYEGTGRLFFEFYRLLHDARPKEGDDRPFFWLFENVVAMGVSDKRDISRFLESNPVMIDAKEVSAAHRARYFWGNLPGMNRPLASTVNDKLELQECLEHGRIAKFSKVRTITTRSNSIKQGKDQHFPVFMNEKEDILWCTEMERVFGFPVHYTDVSNMSRLARQRLLGRSWSVPVIRHLFAPLKEYFACVSSGNSNANSRGPSFSSGLVPLSLRGSHMGPMEIYKTVSAWKRQPVRVLSLFRNIDKVLKSLGFLESGSGSGGGTLKYVEDVTNVVRRDVEKWGPFDLVYGSTQPLGSSCDRCPGWYMFQFHRILQYALPRQESQRPFFWIFMDNLLLTEDDQETTTRFLQTEAVTLQDVRGRDYQNAMRVWSNIPGLKSKHAPLTPKEEEYLQAQVRSRSKLDAPKVDLLVKNCLLPLREYFKYFSQNSLPLGGPSSGAPPPSGGSPAGSPTSTEEGTSESATPESGPGTSTEPSEGSAPGSPAGSPTSTEEGTSTEPSEGSAPGTSTEPSEPKKKRKVYMDKKYSIGLAIGTNSVGWAVITDEYKVPSKKFKVLGNTDRHSIKKNLIGALLFDSGETAEATRLKRTARRRYTRRKNRICYLQEIFSNEMAKVDDSFFHRLEESFLVEEDKKHERHPIFGNIVDEVAYHEKYPTIYHLRKKLVDSTDKADLRLIYLALAHMIKFRGHFLIEGDLNPDNSDVDKLFIQLVQTYNQLFEENPINASGVDAKAILSARLSKSRRLENLIAQLPGEKKNGLFGNLIALSLGLTPNFKSNFDLAEDAKLQLSKDTYDDDLDNLLAQIGDQYADLFLAAKNLSDAILLSDILRVNTEITKAPLSASMIKRYDEHHQDLTLLKALVRQQLPEKYKEIFFDQSKNGYAGYIDGGASQEEFYKFIKPILEKMDGTEELLVKLNREDLLRKQRTFDNGSIPHQIHLGELHAILRRQEDFYPFLKDNREKIEKILTFRIPYYVGPLARGNSRFAWMTRKSEETITPWNFEEVVDKGASAQSFIERMTNFDKNLPNEKVLPKHSLLYEYFTVYNELTKVKYVTEGMRKPAFLSGEQKKAIVDLLFKTNRKVTVKQLKEDYFKKIECFDSVEISGVEDRFNASLGTYHDLLKIIKDKDFLDNEENEDILEDIVLTLTLFEDREMIEERLKTYAHLFDDKVMKQLKRRRYTGWGRLSRKLINGIRDKQSGKTILDFLKSDGFANRNFMQLIHDDSLTFKEDIQKAQVSGQGDSLHEHIANLAGSPAIKKGILQTVKVVDELVKVMGRHKPENIVIEMARENQTTQKGQKNSRERMKRIEEGIKELGSQILKEHPVENTQLQNEKLYLYYLQNGRDMYVDQELDINRLSDYDVDAIVPQSFLKDDSIDNKVLTRSDKNRGKSDNVPSEEVVKKMKNYWRQLLNAKLITQRKFDNLTKAERGGLSELDKAGFIKRQLVETRQITKHVAQILDSRMNTKYDENDKLIREVKVITLKSKLVSDFRKDFQFYKVREINNYHHAHDAYLNAVVGTALIKKYPKLESEFVYGDYKVYDVRKMIAKSEQEIGKATAKYFFYSNIMNFFKTEITLANGEIRKRPLIETNGETGEIVWDKGRDFATVRKVLSMPQVNIVKKTEVQTGGFSKESILPKRNSDKLIARKKDWDPKKYGGFDSPTVAYSVLVVAKVEKGKSKKLKSVKELLGITIMERSSFEKNPIDFLEAKGYKEVKKDLIIKLPKYSLFELENGRKRMLASAGELQKGNELALPSKYVNFLYLASHYEKLKGSPEDNEQKQLFVEQHKHYLDEIIEQISEFSKRVILADANLDKVLSAYNKHRDKPIREQAENIIHLFTLTNLGAPAAFKYFDTTIDRKRYTSTKEVLDATLIHQSITGLYETRIDLSQLGGDPKKKRKVSGSETPGTSESATPESTGRTLVTFKDVFVDFTREEWKLLDTAQQIVYRNVMLENYKNLVSLGYQLTKPDVILRLEKGEEPSTEPSEGSAPGTSTEPSETGNKKLEAVGTGIEPKAMSQGLVTFGDVAVDFSQEEWEWLNPIQRNLYRKVMLENYRNLASLGLCVSKPDVISSLEQGKEPW

SEQ ID NO: 1003 - protein, 2187 aa, synthetic construct
  REGION 1..2187: note = Description of Artificial Sequence: Synthetic polypeptide
MNHDQEFDPPKVYPPVPAEKRKPIRVLSLFDGIATGLLVLKDLGIQVDRYIASEVCEDSITVGMVRHQGKIMYVGDVRSVTQKHIQEWGPFDLVIGGSPCNDLSIVNPARKGLYEGTGRLFFEFYRLLHDARPKEGDDRPFFWLFENVVAMGVSDKRDISRFLESNPVMIDAKEVSAAHRARYFWGNLPGMNRPLASTVNDKLELQECLEHGRIAKFSKVRTITTRSNSIKQGKDQHFPVFMNEKEDILWCTEMERVFGFPVHYTDVSNMSRLARQRLLGRSWSVPVIRHLFAPLKEYFACVSSGNSNANSRGPSFSSGLVPLSLRGSHMGPMEIYKTVSAWKRQPVRVLSLFRNIDKVLKSLGFLESGSGSGGGTLKYVEDVTNVVRRDVEKWGPFDLVYGSTQPLGSSCDRCPGWYMFQFHRILQYALPRQESQRPFFWIFMDNLLLTEDDQETTTRFLQTEAVTLQDVRGRDYQNAMRVWSNIPGLKSKHAPLTPKEEEYLQAQVRSRSKLDAPKVDLLVKNCLLPLREYFKYFSQNSLPLGGPSSGAPPPSGGSPAGSPTSTEEGTSESATPESGPGTSTEPSEGSAPGSPAGSPTSTEEGTSTEPSEGSAPGTSTEPSEPKKKRKVYMDKKYSIGLAIGTNSVGWAVITDEYKVPSKKFKVLGNTDRHSIKKNLIGALLFDSGETAEATRLKRTARRRYTRRKNRICYLQEIFSNEMAKVDDSFFHRLEESFLVEEDKKHERHPIFGNIVDEVAYHEKYPTIYHLRKKLVDSTDKADLRLIYLALAHMIKFRGHFLIEGDLNPDNSDVDKLFIQLVQTYNQLFEENPINASGVDAKAILSARLSKSRRLENLIAQLPGEKKNGLFGNLIALSLGLTPNFKSNFDLAEDAKLQLSKDTYDDDLDNLLAQIGDQYADLFLAAKNLSDAILLSDILRVNTEITKAPLSASMIKRYDEHHQDLTLLKALVRQQLPEKYKEIFFDQSKNGYAGYIDGGASQEEFYKFIKPILEKMDGTEELLVKLNREDLLRKQRTFDNGSIPHQIHLGELHAILRRQEDFYPFLKDNREKIEKILTFRIPYYVGPLARGNSRFAWMTRKSEETITPWNFEEVVDKGASAQSFIERMTNFDKNLPNEKVLPKHSLLYEYFTVYNELTKVKYVTEGMRKPAFLSGEQKKAIVDLLFKTNRKVTVKQLKEDYFKKIECFDSVEISGVEDRFNASLGTYHDLLKIIKDKDFLDNEENEDILEDIVLTLTLFEDREMIEERLKTYAHLFDDKVMKQLKRRRYTGWGRLSRKLINGIRDKQSGKTILDFLKSDGFANRNFMQLIHDDSLTFKEDIQKAQVSGQGDSLHEHIANLAGSPAIKKGILQTVKVVDELVKVMGRHKPENIVIEMARENQTTQKGQKNSRERMKRIEEGIKELGSQILKEHPVENTQLQNEKLYLYYLQNGRDMYVDQELDINRLSDYDVDAIVPQSFLKDDSIDNKVLTRSDKNRGKSDNVPSEEVVKKMKNYWRQLLNAKLITQRKFDNLTKAERGGLSELDKAGFIKRQLVETRQITKHVAQILDSRMNTKYDENDKLIREVKVITLKSKLVSDFRKDFQFYKVREINNYHHAHDAYLNAVVGTALIKKYPKLESEFVYGDYKVYDVRKMIAKSEQEIGKATAKYFFYSNIMNFFKTEITLANGEIRKRPLIETNGETGEIVWDKGRDFATVRKVLSMPQVNIVKKTEVQTGGFSKESILPKRNSDKLIARKKDWDPKKYGGFDSPTVAYSVLVVAKVEKGKSKKLKSVKELLGITIMERSSFEKNPIDFLEAKGYKEVKKDLIIKLPKYSLFELENGRKRMLASAGELQKGNELALPSKYVNFLYLASHYEKLKGSPEDNEQKQLFVEQHKHYLDEIIEQISEFSKRVILADANLDKVLSAYNKHRDKPIREQAENIIHLFTLTNLGAPAAFKYFDTTIDRKRYTSTKEVLDATLIHQSITGLYETRIDLSQLGGDPKKKRKVSGSETPGTSESATPESTGRTLVTFKDVFVDFTREEWKLLDTAQQIVYRNVMLENYKNLVSLGYQLTKPDVILRLEKGEEPSTEPSEGSAPGTSTEPSETGDSVAFEDVAVNFTLEEWALLDPSQKNLYRDVMRETFRNLASVGKQWEDQNIEDPFKIPRRNISHIPERLCESKEGGQGEE

SEQ ID NO: 1004 - protein, 2187 aa, synthetic construct
  REGION 1..2187: note = Description of Artificial Sequence: Synthetic polypeptide
MNHDQEFDPPKVYPPVPAEKRKPIRVLSLFDGIATGLLVLKDLGIQVDRYIASEVCEDSITVGMVRHQGKIMYVGDVRSVTQKHIQEWGPFDLVIGGSPCNDLSIVNPARKGLYEGTGRLFFEFYRLLHDARPKEGDDRPFFWLFENVVAMGVSDKRDISRFLESNPVMIDAKEVSAAHRARYFWGNLPGMNRPLASTVNDKLELQECLEHGRIAKFSKVRTITTRSNSIKQGKDQHFPVFMNEKEDILWCTEMERVFGFPVHYTDVSNMSRLARQRLLGRSWSVPVIRHLFAPLKEYFACVSSGNSNANSRGPSFSSGLVPLSLRGSHMGPMEIYKTVSAWKRQPVRVLSLFRNIDKVLKSLGFLESGSGSGGGTLKYVEDVTNVVRRDVEKWGPFDLVYGSTQPLGSSCDRCPGWYMFQFHRILQYALPRQESQRPFFWIFMDNLLLTEDDQETTTRFLQTEAVTLQDVRGRDYQNAMRVWSNIPGLKSKHAPLTPKEEEYLQAQVRSRSKLDAPKVDLLVKNCLLPLREYFKYFSQNSLPLGGPSSGAPPPSGGSPAGSPTSTEEGTSESATPESGPGTSTEPSEGSAPGSPAGSPTSTEEGTSTEPSEGSAPGTSTEPSEPKKKRKVYMDKKYSIGLAIGTNSVGWAVITDEYKVPSKKFKVLGNTDRHSIKKNLIGALLFDSGETAEATRLKRTARRRYTRRKNRICYLQEIFSNEMAKVDDSFFHRLEESFLVEEDKKHERHPIFGNIVDEVAYHEKYPTIYHLRKKLVDSTDKADLRLIYLALAHMIKFRGHFLIEGDLNPDNSDVDKLFIQLVQTYNQLFEENPINASGVDAKAILSARLSKSRRLENLIAQLPGEKKNGLFGNLIALSLGLTPNFKSNFDLAEDAKLQLSKDTYDDDLDNLLAQIGDQYADLFLAAKNLSDAILLSDILRVNTEITKAPLSASMIKRYDEHHQDLTLLKALVRQQLPEKYKEIFFDQSKNGYAGYIDGGASQEEFYKFIKPILEKMDGTEELLVKLNREDLLRKQRTFDNGSIPHQIHLGELHAILRRQEDFYPFLKDNREKIEKILTFRIPYYVGPLARGNSRFAWMTRKSEETITPWNFEEVVDKGASAQSFIERMTNFDKNLPNEKVLPKHSLLYEYFTVYNELTKVKYVTEGMRKPAFLSGEQKKAIVDLLFKTNRKVTVKQLKEDYFKKIECFDSVEISGVEDRFNASLGTYHDLLKIIKDKDFLDNEENEDILEDIVLTLTLFEDREMIEERLKTYAHLFDDKVMKQLKRRRYTGWGRLSRKLINGIRDKQSGKTILDFLKSDGFANRNFMQLIHDDSLTFKEDIQKAQVSGQGDSLHEHIANLAGSPAIKKGILQTVKVVDELVKVMGRHKPENIVIEMARENQTTQKGQKNSRERMKRIEEGIKELGSQILKEHPVENTQLQNEKLYLYYLQNGRDMYVDQELDINRLSDYDVDAIVPQSFLKDDSIDNKVLTRSDKNRGKSDNVPSEEVVKKMKNYWRQLLNAKLITQRKFDNLTKAERGGLSELDKAGFIKRQLVETRQITKHVAQILDSRMNTKYDENDKLIREVKVITLKSKLVSDFRKDFQFYKVREINNYHHAHDAYLNAVVGTALIKKYPKLESEFVYGDYKVYDVRKMIAKSEQEIGKATAKYFFYSNIMNFFKTEITLANGEIRKRPLIETNGETGEIVWDKGRDFATVRKVLSMPQVNIVKKTEVQTGGFSKESILPKRNSDKLIARKKDWDPKKYGGFDSPTVAYSVLVVAKVEKGKSKKLKSVKELLGITIMERSSFEKNPIDFLEAKGYKEVKKDLIIKLPKYSLFELENGRKRMLASAGELQKGNELALPSKYVNFLYLASHYEKLKGSPEDNEQKQLFVEQHKHYLDEIIEQISEFSKRVILADANLDKVLSAYNKHRDKPIREQAENIIHLFTLTNLGAPAAFKYFDTTIDRKRYTSTKEVLDATLIHQSITGLYETRIDLSQLGGDPKKKRKVSGSETPGTSESATPESTGRTLVTFKDVFVDFTREEWKLLDTAQQIVYRNVMLENYKNLVSLGYQLTKPDVILRLEKGEEPSTEPSEGSAPGTSTEPSETGPSEANSIQSANATTKTSETNHTSRPRLKNVDRSTAQQLAVTVGNVTVIITDFKEKTRSSSTSSSTVTSSAGSEQQNQSSS

SEQ ID NO: 1005 - protein, 2187 aa, synthetic construct
  REGION 1..2187: note = Description of Artificial Sequence: Synthetic polypeptide
MNHDQEFDPPKVYPPVPAEKRKPIRVLSLFDGIATGLLVLKDLGIQVDRYIASEVCEDSITVGMVRHQGKIMYVGDVRSVTQKHIQEWGPFDLVIGGSPCNDLSIVNPARKGLYEGTGRLFFEFYRLLHDARPKEGDDRPFFWLFENVVAMGVSDKRDISRFLESNPVMIDAKEVSAAHRARYFWGNLPGMNRPLASTVNDKLELQECLEHGRIAKFSKVRTITTRSNSIKQGKDQHFPVFMNEKEDILWCTEMERVFGFPVHYTDVSNMSRLARQRLLGRSWSVPVIRHLFAPLKEYFACVSSGNSNANSRGPSFSSGLVPLSLRGSHMGPMEIYKTVSAWKRQPVRVLSLFRNIDKVLKSLGFLESGSGSGGGTLKYVEDVTNVVRRDVEKWGPFDLVYGSTQPLGSSCDRCPGWYMFQFHRILQYALPRQESQRPFFWIFMDNLLLTEDDQETTTRFLQTEAVTLQDVRGRDYQNAMRVWSNIPGLKSKHAPLTPKEEEYLQAQVRSRSKLDAPKVDLLVKNCLLPLREYFKYFSQNSLPLGGPSSGAPPPSGGSPAGSPTSTEEGTSESATPESGPGTSTEPSEGSAPGSPAGSPTSTEEGTSTEPSEGSAPGTSTEPSEPKKKRKVYMDKKYSIGLAIGTNSVGWAVITDEYKVPSKKFKVLGNTDRHSIKKNLIGALLFDSGETAEATRLKRTARRRYTRRKNRICYLQEIFSNEMAKVDDSFFHRLEESFLVEEDKKHERHPIFGNIVDEVAYHEKYPTIYHLRKKLVDSTDKADLRLIYLALAHMIKFRGHFLIEGDLNPDNSDVDKLFIQLVQTYNQLFEENPINASGVDAKAILSARLSKSRRLENLIAQLPGEKKNGLFGNLIALSLGLTPNFKSNFDLAEDAKLQLSKDTYDDDLDNLLAQIGDQYADLFLAAKNLSDAILLSDILRVNTEITKAPLSASMIKRYDEHHQDLTLLKALVRQQLPEKYKEIFFDQSKNGYAGYIDGGASQEEFYKFIKPILEKMDGTEELLVKLNREDLLRKQRTFDNGSIPHQIHLGELHAILRRQEDFYPFLKDNREKIEKILTFRIPYYVGPLARGNSRFAWMTRKSEETITPWNFEEVVDKGASAQSFIERMTNFDKNLPNEKVLPKHSLLYEYFTVYNELTKVKYVTEGMRKPAFLSGEQKKAIVDLLFKTNRKVTVKQLKEDYFKKIECFDSVEISGVEDRFNASLGTYHDLLKIIKDKDFLDNEENEDILEDIVLTLTLFEDREMIEERLKTYAHLFDDKVMKQLKRRRYTGWGRLSRKLINGIRDKQSGKTILDFLKSDGFANRNFMQLIHDDSLTFKEDIQKAQVSGQGDSLHEHIANLAGSPAIKKGILQTVKVVDELVKVMGRHKPENIVIEMARENQTTQKGQKNSRERMKRIEEGIKELGSQILKEHPVENTQLQNEKLYLYYLQNGRDMYVDQELDINRLSDYDVDAIVPQSFLKDDSIDNKVLTRSDKNRGKSDNVPSEEVVKKMKNYWRQLLNAKLITQRKFDNLTKAERGGLSELDKAGFIKRQLVETRQITKHVAQILDSRMNTKYDENDKLIREVKVITLKSKLVSDFRKDFQFYKVREINNYHHAHDAYLNAVVGTALIKKYPKLESEFVYGDYKVYDVRKMIAKSEQEIGKATAKYFFYSNIMNFFKTEITLANGEIRKRPLIETNGETGEIVWDKGRDFATVRKVLSMPQVNIVKKTEVQTGGFSKESILPKRNSDKLIARKKDWDPKKYGGFDSPTVAYSVLVVAKVEKGKSKKLKSVKELLGITIMERSSFEKNPIDFLEAKGYKEVKKDLIIKLPKYSLFELENGRKRMLASAGELQKGNELALPSKYVNFLYLASHYEKLKGSPEDNEQKQLFVEQHKHYLDEIIEQISEFSKRVILADANLDKVLSAYNKHRDKPIREQAENIIHLFTLTNLGAPAAFKYFDTTIDRKRYTSTKEVLDATLIHQSITGLYETRIDLSQLGGDPKKKRKVSGSETPGTSESATPESTGRTLVTFKDVFVDFTREEWKLLDTAQQIVYRNVMLENYKNLVSLGYQLTKPDVILRLEKGEEPSTEPSEGSAPGTSTEPSETGASGDLYEVERIVDKRKNKKGKWEYLIRWKGYGSTEDTWEPEHHLLHCEEFIDEFNGLHMSKDKRIKSGKQSSTSKLLRDS

SEQ ID NO: 1006 - protein, 2187 aa, synthetic construct
  REGION 1..2187: note = Description of Artificial Sequence: Synthetic polypeptide
MNHDQEFDPPKVYPPVPAEKRKPIRVLSLFDGIATGLLVLKDLGIQVDRYIASEVCEDSITVGMVRHQGKIMYVGDVRSVTQKHIQEWGPFDLVIGGSPCNDLSIVNPARKGLYEGTGRLFFEFYRLLHDARPKEGDDRPFFWLFENVVAMGVSDKRDISRFLESNPVMIDAKEVSAAHRARYFWGNLPGMNRPLASTVNDKLELQECLEHGRIAKFSKVRTITTRSNSIKQGKDQHFPVFMNEKEDILWCTEMERVFGFPVHYTDVSNMSRLARQRLLGRSWSVPVIRHLFAPLKEYFACVSSGNSNANSRGPSFSSGLVPLSLRGSHMGPMEIYKTVSAWKRQPVRVLSLFRNIDKVLKSLGFLESGSGSGGGTLKYVEDVTNVVRRDVEKWGPFDLVYGSTQPLGSSCDRCPGWYMFQFHRILQYALPRQESQRPFFWIFMDNLLLTEDDQETTTRFLQTEAVTLQDVRGRDYQNAMRVWSNIPGLKSKHAPLTPKEEEYLQAQVRSRSKLDAPKVDLLVKNCLLPLREYFKYFSQNSLPLGGPSSGAPPPSGGSPAGSPTSTEEGTSESATPESGPGTSTEPSEGSAPGSPAGSPTSTEEGTSTEPSEGSAPGTSTEPSEPKKKRKVYMDKKYSIGLAIGTNSVGWAVITDEYKVPSKKFKVLGNTDRHSIKKNLIGALLFDSGETAEATRLKRTARRRYTRRKNRICYLQEIFSNEMAKVDDSFFHRLEESFLVEEDKKHERHPIFGNIVDEVAYHEKYPTIYHLRKKLVDSTDKADLRLIYLALAHMIKFRGHFLIEGDLNPDNSDVDKLFIQLVQTYNQLFEENPINASGVDAKAILSARLSKSRRLENLIAQLPGEKKNGLFGNLIALSLGLTPNFKSNFDLAEDAKLQLSKDTYDDDLDNLLAQIGDQYADLFLAAKNLSDAILLSDILRVNTEITKAPLSASMIKRYDEHHQDLTLLKALVRQQLPEKYKEIFFDQSKNGYAGYIDGGASQEEFYKFIKPILEKMDGTEELLVKLNREDLLRKQRTFDNGSIPHQIHLGELHAILRRQEDFYPFLKDNREKIEKILTFRIPYYVGPLARGNSRFAWMTRKSEETITPWNFEEVVDKGASAQSFIERMTNFDKNLPNEKVLPKHSLLYEYFTVYNELTKVKYVTEGMRKPAFLSGEQKKAIVDLLFKTNRKVTVKQLKEDYFKKIECFDSVEISGVEDRFNASLGTYHDLLKIIKDKDFLDNEENEDILEDIVLTLTLFEDREMIEERLKTYAHLFDDKVMKQLKRRRYTGWGRLSRKLINGIRDKQSGKTILDFLKSDGFANRNFMQLIHDDSLTFKEDIQKAQVSGQGDSLHEHIANLAGSPAIKKGILQTVKVVDELVKVMGRHKPENIVIEMARENQTTQKGQKNSRERMKRIEEGIKELGSQILKEHPVENTQLQNEKLYLYYLQNGRDMYVDQELDINRLSDYDVDAIVPQSFLKDDSIDNKVLTRSDKNRGKSDNVPSEEVVKKMKNYWRQLLNAKLITQRKFDNLTKAERGGLSELDKAGFIKRQLVETRQITKHVAQILDSRMNTKYDENDKLIREVKVITLKSKLVSDFRKDFQFYKVREINNYHHAHDAYLNAVVGTALIKKYPKLESEFVYGDYKVYDVRKMIAKSEQEIGKATAKYFFYSNIMNFFKTEITLANGEIRKRPLIETNGETGEIVWDKGRDFATVRKVLSMPQVNIVKKTEVQTGGFSKESILPKRNSDKLIARKKDWDPKKYGGFDSPTVAYSVLVVAKVEKGKSKKLKSVKELLGITIMERSSFEKNPIDFLEAKGYKEVKKDLIIKLPKYSLFELENGRKRMLASAGELQKGNELALPSKYVNFLYLASHYEKLKGSPEDNEQKQLFVEQHKHYLDEIIEQISEFSKRVILADANLDKVLSAYNKHRDKPIREQAENIIHLFTLTNLGAPAAFKYFDTTIDRKRYTSTKEVLDATLIHQSITGLYETRIDLSQLGGDPKKKRKVSGSETPGTSESATPESTGRTLVTFKDVFVDFTREEWKLLDTAQQIVYRNVMLENYKNLVSLGYQLTKPDVILRLEKGEEPSTEPSEGSAPGTSTEPSETGKDPNEPQKPVSAYALFFRDTQAAIKGQNPNATFGEVSKIVASMWDGLGEEQKQVYKKKTEAAKKEYLKQLAAYRASLVSK

SEQ ID NO: 1007 - protein, 2187 aa, synthetic construct
  REGION 1..2187: note = Description of Artificial Sequence: Synthetic polypeptide
MNHDQEFDPPKVYPPVPAEKRKPIRVLSLFDGIATGLLVLKDLGIQVDRYIASEVCEDSITVGMVRHQGKIMYVGDVRSVTQKHIQEWGPFDLVIGGSPCNDLSIVNPARKGLYEGTGRLFFEFYRLLHDARPKEGDDRPFFWLFENVVAMGVSDKRDISRFLESNPVMIDAKEVSAAHRARYFWGNLPGMNRPLASTVNDKLELQECLEHGRIAKFSKVRTITTRSNSIKQGKDQHFPVFMNEKEDILWCTEMERVFGFPVHYTDVSNMSRLARQRLLGRSWSVPVIRHLFAPLKEYFACVSSGNSNANSRGPSFSSGLVPLSLRGSHMGPMEIYKTVSAWKRQPVRVLSLFRNIDKVLKSLGFLESGSGSGGGTLKYVEDVTNVVRRDVEKWGPFDLVYGSTQPLGSSCDRCPGWYMFQFHRILQYALPRQESQRPFFWIFMDNLLLTEDDQETTTRFLQTEAVTLQDVRGRDYQNAMRVWSNIPGLKSKHAPLTPKEEEYLQAQVRSRSKLDAPKVDLLVKNCLLPLREYFKYFSQNSLPLGGPSSGAPPPSGGSPAGSPTSTEEGTSESATPESGPGTSTEPSEGSAPGSPAGSPTSTEEGTSTEPSEGSAPGTSTEPSEPKKKRKVYMDKKYSIGLAIGTNSVGWAVITDEYKVPSKKFKVLGNTDRHSIKKNLIGALLFDSGETAEATRLKRTARRRYTRRKNRICYLQEIFSNEMAKVDDSFFHRLEESFLVEEDKKHERHPIFGNIVDEVAYHEKYPTIYHLRKKLVDSTDKADLRLIYLALAHMIKFRGHFLIEGDLNPDNSDVDKLFIQLVQTYNQLFEENPINASGVDAKAILSARLSKSRRLENLIAQLPGEKKNGLFGNLIALSLGLTPNFKSNFDLAEDAKLQLSKDTYDDDLDNLLAQIGDQYADLFLAAKNLSDAILLSDILRVNTEITKAPLSASMIKRYDEHHQDLTLLKALVRQQLPEKYKEIFFDQSKNGYAGYIDGGASQEEFYKFIKPILEKMDGTEELLVKLNREDLLRKQRTFDNGSIPHQIHLGELHAILRRQEDFYPFLKDNREKIEKILTFRIPYYVGPLARGNSRFAWMTRKSEETITPWNFEEVVDKGASAQSFIERMTNFDKNLPNEKVLPKHSLLYEYFTVYNELTKVKYVTEGMRKPAFLSGEQKKAIVDLLFKTNRKVTVKQLKEDYFKKIECFDSVEISGVEDRFNASLGTYHDLLKIIKDKDFLDNEENEDILEDIVLTLTLFEDREMIEERLKTYAHLFDDKVMKQLKRRRYTGWGRLSRKLINGIRDKQSGKTILDFLKSDGFANRNFMQLIHDDSLTFKEDIQKAQVSGQGDSLHEHIANLAGSPAIKKGILQTVKVVDELVKVMGRHKPENIVIEMARENQTTQKGQKNSRERMKRIEEGIKELGSQILKEHPVENTQLQNEKLYLYYLQNGRDMYVDQELDINRLSDYDVDAIVPQSFLKDDSIDNKVLTRSDKNRGKSDNVPSEEVVKKMKNYWRQLLNAKLITQRKFDNLTKAERGGLSELDKAGFIKRQLVETRQITKHVAQILDSRMNTKYDENDKLIREVKVITLKSKLVSDFRKDFQFYKVREINNYHHAHDAYLNAVVGTALIKKYPKLESEFVYGDYKVYDVRKMIAKSEQEIGKATAKYFFYSNIMNFFKTEITLANGEIRKRPLIETNGETGEIVWDKGRDFATVRKVLSMPQVNIVKKTEVQTGGFSKESILPKRNSDKLIARKKDWDPKKYGGFDSPTVAYSVLVVAKVEKGKSKKLKSVKELLGITIMERSSFEKNPIDFLEAKGYKEVKKDLIIKLPKYSLFELENGRKRMLASAGELQKGNELALPSKYVNFLYLASHYEKLKGSPEDNEQKQLFVEQHKHYLDEIIEQISEFSKRVILADANLDKVLSAYNKHRDKPIREQAENIIHLFTLTNLGAPAAFKYFDTTIDRKRYTSTKEVLDATLIHQSITGLYETRIDLSQLGGDPKKKRKVSGSETPGTSESATPESTGRTLVTFKDVFVDFTREEWKLLDTAQQIVYRNVMLENYKNLVSLGYQLTKPDVILRLEKGEEPSTEPSEGSAPGTSTEPSETGDASRLSGRDPSSWTVEDVMQFVREADPQLGPHADLFRKHEIDGKALLLLRSDMMMKYMGLKLGPALKLSYHIDRLKQGKF

SEQ ID NO: 1008 - protein, 2187 aa, synthetic construct
  REGION 1..2187: note = Description of Artificial Sequence: Synthetic polypeptide
MNHDQEFDPPKVYPPVPAEKRKPIRVLSLFDGIATGLLVLKDLGIQVDRYIASEVCEDSITVGMVRHQGKIMYVGDVRSVTQKHIQEWGPFDLVIGGSPCNDLSIVNPARKGLYEGTGRLFFEFYRLLHDARPKEGDDRPFFWLFENVVAMGVSDKRDISRFLESNPVMIDAKEVSAAHRARYFWGNLPGMNRPLASTVNDKLELQECLEHGRIAKFSKVRTITTRSNSIKQGKDQHFPVFMNEKEDILWCTEMERVFGFPVHYTDVSNMSRLARQRLLGRSWSVPVIRHLFAPLKEYFACVSSGNSNANSRGPSFSSGLVPLSLRGSHMGPMEIYKTVSAWKRQPVRVLSLFRNIDKVLKSLGFLESGSGSGGGTLKYVEDVTNVVRRDVEKWGPFDLVYGSTQPLGSSCDRCPGWYMFQFHRILQYALPRQESQRPFFWIFMDNLLLTEDDQETTTRFLQTEAVTLQDVRGRDYQNAMRVWSNIPGLKSKHAPLTPKEEEYLQAQVRSRSKLDAPKVDLLVKNCLLPLREYFKYFSQNSLPLGGPSSGAPPPSGGSPAGSPTSTEEGTSESATPESGPGTSTEPSEGSAPGSPAGSPTSTEEGTSTEPSEGSAPGTSTEPSEPKKKRKVYMDKKYSIGLAIGTNSVGWAVITDEYKVPSKKFKVLGNTDRHSIKKNLIGALLFDSGETAEATRLKRTARRRYTRRKNRICYLQEIFSNEMAKVDDSFFHRLEESFLVEEDKKHERHPIFGNIVDEVAYHEKYPTIYHLRKKLVDSTDKADLRLIYLALAHMIKFRGHFLIEGDLNPDNSDVDKLFIQLVQTYNQLFEENPINASGVDAKAILSARLSKSRRLENLIAQLPGEKKNGLFGNLIALSLGLTPNFKSNFDLAEDAKLQLSKDTYDDDLDNLLAQIGDQYADLFLAAKNLSDAILLSDILRVNTEITKAPLSASMIKRYDEHHQDLTLLKALVRQQLPEKYKEIFFDQSKNGYAGYIDGGASQEEFYKFIKPILEKMDGTEELLVKLNREDLLRKQRTFDNGSIPHQIHLGELHAILRRQEDFYPFLKDNREKIEKILTFRIPYYVGPLARGNSRFAWMTRKSEETITPWNFEEVVDKGASAQSFIERMTNFDKNLPNEKVLPKHSLLYEYFTVYNELTKVKYVTEGMRKPAFLSGEQKKAIVDLLFKTNRKVTVKQLKEDYFKKIECFDSVEISGVEDRFNASLGTYHDLLKIIKDKDFLDNEENEDILEDIVLTLTLFEDREMIEERLKTYAHLFDDKVMKQLKRRRYTGWGRLSRKLINGIRDKQSGKTILDFLKSDGFANRNFMQLIHDDSLTFKEDIQKAQVSGQGDSLHEHIANLAGSPAIKKGILQTVKVVDELVKVMGRHKPENIVIEMARENQTTQKGQKNSRERMKRIEEGIKELGSQILKEHPVENTQLQNEKLYLYYLQNGRDMYVDQELDINRLSDYDVDAIVPQSFLKDDSIDNKVLTRSDKNRGKSDNVPSEEVVKKMKNYWRQLLNAKLITQRKFDNLTKAERGGLSELDKAGFIKRQLVETRQITKHVAQILDSRMNTKYDENDKLIREVKVITLKSKLVSDFRKDFQFYKVREINNYHHAHDAYLNAVVGTALIKKYPKLESEFVYGDYKVYDVRKMIAKSEQEIGKATAKYFFYSNIMNFFKTEITLANGEIRKRPLIETNGETGEIVWDKGRDFATVRKVLSMPQVNIVKKTEVQTGGFSKESILPKRNSDKLIARKKDWDPKKYGGFDSPTVAYSVLVVAKVEKGKSKKLKSVKELLGITIMERSSFEKNPIDFLEAKGYKEVKKDLIIKLPKYSLFELENGRKRMLASAGELQKGNELALPSKYVNFLYLASHYEKLKGSPEDNEQKQLFVEQHKHYLDEIIEQISEFSKRVILADANLDKVLSAYNKHRDKPIREQAENIIHLFTLTNLGAPAAFKYFDTTIDRKRYTSTKEVLDATLIHQSITGLYETRIDLSQLGGDPKKKRKVSGSETPGTSESATPESTGRTLVTFKDVFVDFTREEWKLLDTAQQIVYRNVMLENYKNLVSLGYQLTKPDVILRLEKGEEPSTEPSEGSAPGTSTEPSETGKQGFSKDPSTWSVDEVIQFMKHTDPQISGPLADLFRQHEIDGKALFLLKSDVMMKYMGLKLGPALKLCYYIEKLKEGKYS

SEQ ID NO: 1009 - protein, 2187 aa, synthetic construct
  REGION 1..2187: note = Description of Artificial Sequence: Synthetic polypeptide
MNHDQEFDPPKVYPPVPAEKRKPIRVLSLFDGIATGLLVLKDLGIQVDRYIASEVCEDSITVGMVRHQGKIMYVGDVRSVTQKHIQEWGPFDLVIGGSPCNDLSIVNPARKGLYEGTGRLFFEFYRLLHDARPKEGDDRPFFWLFENVVAMGVSDKRDISRFLESNPVMIDAKEVSAAHRARYFWGNLPGMNRPLASTVNDKLELQECLEHGRIAKFSKVRTITTRSNSIKQGKDQHFPVFMNEKEDILWCTEMERVFGFPVHYTDVSNMSRLARQRLLGRSWSVPVIRHLFAPLKEYFACVSSGNSNANSRGPSFSSGLVPLSLRGSHMGPMEIYKTVSAWKRQPVRVLSLFRNIDKVLKSLGFLESGSGSGGGTLKYVEDVTNVVRRDVEKWGPFDLVYGSTQPLGSSCDRCPGWYMFQFHRILQYALPRQESQRPFFWIFMDNLLLTEDDQETTTRFLQTEAVTLQDVRGRDYQNAMRVWSNIPGLKSKHAPLTPKEEEYLQAQVRSRSKLDAPKVDLLVKNCLLPLREYFKYFSQNSLPLGGPSSGAPPPSGGSPAGSPTSTEEGTSESATPESGPGTSTEPSEGSAPGSPAGSPTSTEEGTSTEPSEGSAPGTSTEPSEPKKKRKVYMDKKYSIGLAIGTNSVGWAVITDEYKVPSKKFKVLGNTDRHSIKKNLIGALLFDSGETAEATRLKRTARRRYTRRKNRICYLQEIFSNEMAKVDDSFFHRLEESFLVEEDKKHERHPIFGNIVDEVAYHEKYPTIYHLRKKLVDSTDKADLRLIYLALAHMIKFRGHFLIEGDLNPDNSDVDKLFIQLVQTYNQLFEENPINASGVDAKAILSARLSKSRRLENLIAQLPGEKKNGLFGNLIALSLGLTPNFKSNFDLAEDAKLQLSKDTYDDDLDNLLAQIGDQYADLFLAAKNLSDAILLSDILRVNTEITKAPLSASMIKRYDEHHQDLTLLKALVRQQLPEKYKEIFFDQSKNGYAGYIDGGASQEEFYKFIKPILEKMDGTEELLVKLNREDLLRKQRTFDNGSIPHQIHLGELHAILRRQEDFYPFLKDNREKIEKILTFRIPYYVGPLARGNSRFAWMTRKSEETITPWNFEEVVDKGASAQSFIERMTNFDKNLPNEKVLPKHSLLYEYFTVYNELTKVKYVTEGMRKPAFLSGEQKKAIVDLLFKTNRKVTVKQLKEDYFKKIECFDSVEISGVEDRFNASLGTYHDLLKIIKDKDFLDNEENEDILEDIVLTLTLFEDREMIEERLKTYAHLFDDKVMKQLKRRRYTGWGRLSRKLINGIRDKQSGKTILDFLKSDGFANRNFMQLIHDDSLTFKEDIQKAQVSGQGDSLHEHIANLAGSPAIKKGILQTVKVVDELVKVMGRHKPENIVIEMARENQTTQKGQKNSRERMKRIEEGIKELGSQILKEHPVENTQLQNEKLYLYYLQNGRDMYVDQELDINRLSDYDVDAIVPQSFLKDDSIDNKVLTRSDKNRGKSDNVPSEEVVKKMKNYWRQLLNAKLITQRKFDNLTKAERGGLSELDKAGFIKRQLVETRQITKHVAQILDSRMNTKYDENDKLIREVKVITLKSKLVSDFRKDFQFYKVREINNYHHAHDAYLNAVVGTALIKKYPKLESEFVYGDYKVYDVRKMIAKSEQEIGKATAKYFFYSNIMNFFKTEITLANGEIRKRPLIETNGETGEIVWDKGRDFATVRKVLSMPQVNIVKKTEVQTGGFSKESILPKRNSDKLIARKKDWDPKKYGGFDSPTVAYSVLVVAKVEKGKSKKLKSVKELLGITIMERSSFEKNPIDFLEAKGYKEVKKDLIIKLPKYSLFELENGRKRMLASAGELQKGNELALPSKYVNFLYLASHYEKLKGSPEDNEQKQLFVEQHKHYLDEIIEQISEFSKRVILADANLDKVLSAYNKHRDKPIREQAENIIHLFTLTNLGAPAAFKYFDTTIDRKRYTSTKEVLDATLIHQSITGLYETRIDLSQLGGDPKKKRKVSGSETPGTSESATPESTGRTLVTFKDVFVDFTREEWKLLDTAQQIVYRNVMLENYKNLVSLGYQLTKPDVILRLEKGEEPSTEPSEGSAPGTSTEPSETGGSGPPSSGGGLYRDMGAQGGRPSLIARIPVARILGDPEEESWSPSLTNLEKVVVTDVTSNFLTVTIKESNTDQGFFKEKR

SEQ ID NO: 1010 - protein, 2187 aa, synthetic construct
  REGION 1..2187: note = Description of Artificial Sequence: Synthetic polypeptide
MNHDQEFDPPKVYPPVPAEKRKPIRVLSLFDGIATGLLVLKDLGIQVDRYIASEVCEDSITVGMVRHQGKIMYVGDVRSVTQKHIQEWGPFDLVIGGSPCNDLSIVNPARKGLYEGTGRLFFEFYRLLHDARPKEGDDRPFFWLFENVVAMGVSDKRDISRFLESNPVMIDAKEVSAAHRARYFWGNLPGMNRPLASTVNDKLELQECLEHGRIAKFSKVRTITTRSNSIKQGKDQHFPVFMNEKEDILWCTEMERVFGFPVHYTDVSNMSRLARQRLLGRSWSVPVIRHLFAPLKEYFACVSSGNSNANSRGPSFSSGLVPLSLRGSHMGPMEIYKTVSAWKRQPVRVLSLFRNIDKVLKSLGFLESGSGSGGGTLKYVEDVTNVVRRDVEKWGPFDLVYGSTQPLGSSCDRCPGWYMFQFHRILQYALPRQESQRPFFWIFMDNLLLTEDDQETTTRFLQTEAVTLQDVRGRDYQNAMRVWSNIPGLKSKHAPLTPKEEEYLQAQVRSRSKLDAPKVDLLVKNCLLPLREYFKYFSQNSLPLGGPSSGAPPPSGGSPAGSPTSTEEGTSESATPESGPGTSTEPSEGSAPGSPAGSPTSTEEGTSTEPSEGSAPGTSTEPSEPKKKRKVYMDKKYSIGLAIGTNSVGWAVITDEYKVPSKKFKVLGNTDRHSIKKNLIGALLFDSGETAEATRLKRTARRRYTRRKNRICYLQEIFSNEMAKVDDSFFHRLEESFLVEEDKKHERHPIFGNIVDEVAYHEKYPTIYHLRKKLVDSTDKADLRLIYLALAHMIKFRGHFLIEGDLNPDNSDVDKLFIQLVQTYNQLFEENPINASGVDAKAILSARLSKSRRLENLIAQLPGEKKNGLFGNLIALSLGLTPNFKSNFDLAEDAKLQLSKDTYDDDLDNLLAQIGDQYADLFLAAKNLSDAILLSDILRVNTEITKAPLSASMIKRYDEHHQDLTLLKALVRQQLPEKYKEIFFDQSKNGYAGYIDGGASQEEFYKFIKPILEKMDGTEELLVKLNREDLLRKQRTFDNGSIPHQIHLGELHAILRRQEDFYPFLKDNREKIEKILTFRIPYYVGPLARGNSRFAWMTRKSEETITPWNFEEVVDKGASAQSFIERMTNFDKNLPNEKVLPKHSLLYEYFTVYNELTKVKYVTEGMRKPAFLSGEQKKAIVDLLFKTNRKVTVKQLKEDYFKKIECFDSVEISGVEDRFNASLGTYHDLLKIIKDKDFLDNEENEDILEDIVLTLTLFEDREMIEERLKTYAHLFDDKVMKQLKRRRYTGWGRLSRKLINGIRDKQSGKTILDFLKSDGFANRNFMQLIHDDSLTFKEDIQKAQVSGQGDSLHEHIANLAGSPAIKKGILQTVKVVDELVKVMGRHKPENIVIEMARENQTTQKGQKNSRERMKRIEEGIKELGSQILKEHPVENTQLQNEKLYLYYLQNGRDMYVDQELDINRLSDYDVDAIVPQSFLKDDSIDNKVLTRSDKNRGKSDNVPSEEVVKKMKNYWRQLLNAKLITQRKFDNLTKAERGGLSELDKAGFIKRQLVETRQITKHVAQILDSRMNTKYDENDKLIREVKVITLKSKLVSDFRKDFQFYKVREINNYHHAHDAYLNAVVGTALIKKYPKLESEFVYGDYKVYDVRKMIAKSEQEIGKATAKYFFYSNIMNFFKTEITLANGEIRKRPLIETNGETGEIVWDKGRDFATVRKVLSMPQVNIVKKTEVQTGGFSKESILPKRNSDKLIARKKDWDPKKYGGFDSPTVAYSVLVVAKVEKGKSKKLKSVKELLGITIMERSSFEKNPIDFLEAKGYKEVKKDLIIKLPKYSLFELENGRKRMLASAGELQKGNELALPSKYVNFLYLASHYEKLKGSPEDNEQKQLFVEQHKHYLDEIIEQISEFSKRVILADANLDKVLSAYNKHRDKPIREQAENIIHLFTLTNLGAPAAFKYFDTTIDRKRYTSTKEVLDATLIHQSITGLYETRIDLSQLGGDPKKKRKVSGSETPGTSESATPESTGRTLVTFKDVFVDFTREEWKLLDTAQQIVYRNVMLENYKNLVSLGYQLTKPDVILRLEKGEEPSTEPSEGSAPGTSTEPSETGKDPNEPQKPVSAYALFFRDTQAAIKGQNPNATFGEVSKIVASMWDSLGEEQKQVYKRKTEAAKKEYLKALAAYRASLVSK

SEQ ID NO: 1011 - protein, 2187 aa, synthetic construct
  REGION 1..2187: note = Description of Artificial Sequence: Synthetic polypeptide
MNHDQEFDPPKVYPPVPAEKRKPIRVLSLFDGIATGLLVLKDLGIQVDRYIASEVCEDSITVGMVRHQGKIMYVGDVRSVTQKHIQEWGPFDLVIGGSPCNDLSIVNPARKGLYEGTGRLFFEFYRLLHDARPKEGDDRPFFWLFENVVAMGVSDKRDISRFLESNPVMIDAKEVSAAHRARYFWGNLPGMNRPLASTVNDKLELQECLEHGRIAKFSKVRTITTRSNSIKQGKDQHFPVFMNEKEDILWCTEMERVFGFPVHYTDVSNMSRLARQRLLGRSWSVPVIRHLFAPLKEYFACVSSGNSNANSRGPSFSSGLVPLSLRGSHMGPMEIYKTVSAWKRQPVRVLSLFRNIDKVLKSLGFLESGSGSGGGTLKYVEDVTNVVRRDVEKWGPFDLVYGSTQPLGSSCDRCPGWYMFQFHRILQYALPRQESQRPFFWIFMDNLLLTEDDQETTTRFLQTEAVTLQDVRGRDYQNAMRVWSNIPGLKSKHAPLTPKEEEYLQAQVRSRSKLDAPKVDLLVKNCLLPLREYFKYFSQNSLPLGGPSSGAPPPSGGSPAGSPTSTEEGTSESATPESGPGTSTEPSEGSAPGSPAGSPTSTEEGTSTEPSEGSAPGTSTEPSEPKKKRKVYMDKKYSIGLAIGTNSVGWAVITDEYKVPSKKFKVLGNTDRHSIKKNLIGALLFDSGETAEATRLKRTARRRYTRRKNRICYLQEIFSNEMAKVDDSFFHRLEESFLVEEDKKHERHPIFGNIVDEVAYHEKYPTIYHLRKKLVDSTDKADLRLIYLALAHMIKFRGHFLIEGDLNPDNSDVDKLFIQLVQTYNQLFEENPINASGVDAKAILSARLSKSRRLENLIAQLPGEKKNGLFGNLIALSLGLTPNFKSNFDLAEDAKLQLSKDTYDDDLDNLLAQIGDQYADLFLAAKNLSDAILLSDILRVNTEITKAPLSASMIKRYDEHHQDLTLLKALVRQQLPEKYKEIFFDQSKNGYAGYIDGGASQEEFYKFIKPILEKMDGTEELLVKLNREDLLRKQRTFDNGSIPHQIHLGELHAILRRQEDFYPFLKDNREKIEKILTFRIPYYVGPLARGNSRFAWMTRKSEETITPWNFEEVVDKGASAQSFIERMTNFDKNLPNEKVLPKHSLLYEYFTVYNELTKVKYVTEGMRKPAFLSGEQKKAIVDLLFKTNRKVTVKQLKEDYFKKIECFDSVEISGVEDRFNASLGTYHDLLKIIKDKDFLDNEENEDILEDIVLTLTLFEDREMIEERLKTYAHLFDDKVMKQLKRRRYTGWGRLSRKLINGIRDKQSGKTILDFLKSDGFANRNFMQLIHDDSLTFKEDIQKAQVSGQGDSLHEHIANLAGSPAIKKGILQTVKVVDELVKVMGRHKPENIVIEMARENQTTQKGQKNSRERMKRIEEGIKELGSQILKEHPVENTQLQNEKLYLYYLQNGRDMYVDQELDINRLSDYDVDAIVPQSFLKDDSIDNKVLTRSDKNRGKSDNVPSEEVVKKMKNYWRQLLNAKLITQRKFDNLTKAERGGLSELDKAGFIKRQLVETRQITKHVAQILDSRMNTKYDENDKLIREVKVITLKSKLVSDFRKDFQFYKVREINNYHHAHDAYLNAVVGTALIKKYPKLESEFVYGDYKVYDVRKMIAKSEQEIGKATAKYFFYSNIMNFFKTEITLANGEIRKRPLIETNGETGEIVWDKGRDFATVRKVLSMPQVNIVKKTEVQTGGFSKESILPKRNSDKLIARKKDWDPKKYGGFDSPTVAYSVLVVAKVEKGKSKKLKSVKELLGITIMERSSFEKNPIDFLEAKGYKEVKKDLIIKLPKYSLFELENGRKRMLASAGELQKGNELALPSKYVNFLYLASHYEKLKGSPEDNEQKQLFVEQHKHYLDEIIEQISEFSKRVILADANLDKVLSAYNKHRDKPIREQAENIIHLFTLTNLGAPAAFKYFDTTIDRKRYTSTKEVLDATLIHQSITGLYETRIDLSQLGGDPKKKRKVSGSETPGTSESATPESTGRTLVTFKDVFVDFTREEWKLLDTAQQIVYRNVMLENYKNLVSLGYQLTKPDVILRLEKGEEPSTEPSEGSAPGTSTEPSETGKDPNEPQKPVSAYALFFRDTQAAIKGQNPNATFGEVSKIVASMWDSLGEEQKQVYKRKTEAAKKEYLKALAAYKDNQECQ

SEQ ID NO: 1012 - protein, 2187 aa, synthetic construct
  REGION 1..2187: note = Description of Artificial Sequence: Synthetic polypeptide
MNHDQEFDPPKVYPPVPAEKRKPIRVLSLFDGIATGLLVLKDLGIQVDRYIASEVCEDSITVGMVRHQGKIMYVGDVRSVTQKHIQEWGPFDLVIGGSPCNDLSIVNPARKGLYEGTGRLFFEFYRLLHDARPKEGDDRPFFWLFENVVAMGVSDKRDISRFLESNPVMIDAKEVSAAHRARYFWGNLPGMNRPLASTVNDKLELQECLEHGRIAKFSKVRTITTRSNSIKQGKDQHFPVFMNEKEDILWCTEMERVFGFPVHYTDVSNMSRLARQRLLGRSWSVPVIRHLFAPLKEYFACVSSGNSNANSRGPSFSSGLVPLSLRGSHMGPMEIYKTVSAWKRQPVRVLSLFRNIDKVLKSLGFLESGSGSGGGTLKYVEDVTNVVRRDVEKWGPFDLVYGSTQPLGSSCDRCPGWYMFQFHRILQYALPRQESQRPFFWIFMDNLLLTEDDQETTTRFLQTEAVTLQDVRGRDYQNAMRVWSNIPGLKSKHAPLTPKEEEYLQAQVRSRSKLDAPKVDLLVKNCLLPLREYFKYFSQNSLPLGGPSSGAPPPSGGSPAGSPTSTEEGTSESATPESGPGTSTEPSEGSAPGSPAGSPTSTEEGTSTEPSEGSAPGTSTEPSEPKKKRKVYMDKKYSIGLAIGTNSVGWAVITDEYKVPSKKFKVLGNTDRHSIKKNLIGALLFDSGETAEATRLKRTARRRYTRRKNRICYLQEIFSNEMAKVDDSFFHRLEESFLVEEDKKHERHPIFGNIVDEVAYHEKYPTIYHLRKKLVDSTDKADLRLIYLALAHMIKFRGHFLIEGDLNPDNSDVDKLFIQLVQTYNQLFEENPINASGVDAKAILSARLSKSRRLENLIAQLPGEKKNGLFGNLIALSLGLTPNFKSNFDLAEDAKLQLSKDTYDDDLDNLLAQIGDQYADLFLAAKNLSDAILLSDILRVNTEITKAPLSASMIKRYDEHHQDLTLLKALVRQQLPEKYKEIFFDQSKNGYAGYIDGGASQEEFYKFIKPILEKMDGTEELLVKLNREDLLRKQRTFDNGSIPHQIHLGELHAILRRQEDFYPFLKDNREKIEKILTFRIPYYVGPLARGNSRFAWMTRKSEETITPWNFEEVVDKGASAQSFIERMTNFDKNLPNEKVLPKHSLLYEYFTVYNELTKVKYVTEGMRKPAFLSGEQKKAIVDLLFKTNRKVTVKQLKEDYFKKIECFDSVEISGVEDRFNASLGTYHDLLKIIKDKDFLDNEENEDILEDIVLTLTLFEDREMIEERLKTYAHLFDDKVMKQLKRRRYTGWGRLSRKLINGIRDKQSGKTILDFLKSDGFANRNFMQLIHDDSLTFKEDIQKAQVSGQGDSLHEHIANLAGSPAIKKGILQTVKVVDELVKVMGRHKPENIVIEMARENQTTQKGQKNSRERMKRIEEGIKELGSQILKEHPVENTQLQNEKLYLYYLQNGRDMYVDQELDINRLSDYDVDAIVPQSFLKDDSIDNKVLTRSDKNRGKSDNVPSEEVVKKMKNYWRQLLNAKLITQRKFDNLTKAERGGLSELDKAGFIKRQLVETRQITKHVAQILDSRMNTKYDENDKLIREVKVITLKSKLVSDFRKDFQFYKVREINNYHHAHDAYLNAVVGTALIKKYPKLESEFVYGDYKVYDVRKMIAKSEQEIGKATAKYFFYSNIMNFFKTEITLANGEIRKRPLIETNGETGEIVWDKGRDFATVRKVLSMPQVNIVKKTEVQTGGFSKESILPKRNSDKLIARKKDWDPKKYGGFDSPTVAYSVLVVAKVEKGKSKKLKSVKELLGITIMERSSFEKNPIDFLEAKGYKEVKKDLIIKLPKYSLFELENGRKRMLASAGELQKGNELALPSKYVNFLYLASHYEKLKGSPEDNEQKQLFVEQHKHYLDEIIEQISEFSKRVILADANLDKVLSAYNKHRDKPIREQAENIIHLFTLTNLGAPAAFKYFDTTIDRKRYTSTKEVLDATLIHQSITGLYETRIDLSQLGGDPKKKRKVSGSETPGTSESATPESTGRTLVTFKDVFVDFTREEWKLLDTAQQIVYRNVMLENYKNLVSLGYQLTKPDVILRLEKGEEPSTEPSEGSAPGTSTEPSETGASVQASRRQWCYLCDLPKMPWAMVWDFSEAVCRGCVNFEGADRIELLIDAARQLKRSHVLPEGRSPGPPALKHPATKDLA

SEQ ID NO: 1013 - protein, 2518 aa, synthetic construct
  REGION 1..2518: note = Description of Artificial Sequence: Synthetic polypeptide
MNHDQEFDPPKVYPPVPAEKRKPIRVLSLFDGIATGLLVLKDLGIQVDRYIASEVCEDSITVGMVRHQGKIMYVGDVRSVTQKHIQEWGPFDLVIGGSPCNDLSIVNPARKGLYEGTGRLFFEFYRLLHDARPKEGDDRPFFWLFENVVAMGVSDKRDISRFLESNPVMIDAKEVSAAHRARYFWGNLPGMNRPLASTVNDKLELQECLEHGRIAKFSKVRTITTRSNSIKQGKDQHFPVFMNEKEDILWCTEMERVFGFPVHYTDVSNMSRLARQRLLGRSWSVPVIRHLFAPLKEYFACVSSGNSNANSRGPSFSSGLVPLSLRGSHMGPMEIYKTVSAWKRQPVRVLSLFRNIDKVLKSLGFLESGSGSGGGTLKYVEDVTNVVRRDVEKWGPFDLVYGSTQPLGSSCDRCPGWYMFQFHRILQYALPRQESQRPFFWIFMDNLLLTEDDQETTTRFLQTEAVTLQDVRGRDYQNAMRVWSNIPGLKSKHAPLTPKEEEYLQAQVRSRSKLDAPKVDLLVKNCLLPLREYFKYFSQNSLPLGGPSSGAPPPSGGSPAGSPTSTEEGTSESATPESGPGTSTEPSEGSAPGSPAGSPTSTEEGTSTEPSEGSAPGTSTEPSEPKKKRKVYMDKKYSIGLAIGTNSVGWAVITDEYKVPSKKFKVLGNTDRHSIKKNLIGALLFDSGETAEATRLKRTARRRYTRRKNRICYLQEIFSNEMAKVDDSFFHRLEESFLVEEDKKHERHPIFGNIVDEVAYHEKYPTIYHLRKKLVDSTDKADLRLIYLALAHMIKFRGHFLIEGDLNPDNSDVDKLFIQLVQTYNQLFEENPINASGVDAKAILSARLSKSRRLENLIAQLPGEKKNGLFGNLIALSLGLTPNFKSNFDLAEDAKLQLSKDTYDDDLDNLLAQIGDQYADLFLAAKNLSDAILLSDILRVNTEITKAPLSASMIKRYDEHHQDLTLLKALVRQQLPEKYKEIFFDQSKNGYAGYIDGGASQEEFYKFIKPILEKMDGTEELLVKLNREDLLRKQRTFDNGSIPHQIHLGELHAILRRQEDFYPFLKDNREKIEKILTFRIPYYVGPLARGNSRFAWMTRKSEETITPWNFEEVVDKGASAQSFIERMTNFDKNLPNEKVLPKHSLLYEYFTVYNELTKVKYVTEGMRKPAFLSGEQKKAIVDLLFKTNRKVTVKQLKEDYFKKIECFDSVEISGVEDRFNASLGTYHDLLKIIKDKDFLDNEENEDILEDIVLTLTLFEDREMIEERLKTYAHLFDDKVMKQLKRRRYTGWGRLSRKLINGIRDKQSGKTILDFLKSDGFANRNFMQLIHDDSLTFKEDIQKAQVSGQGDSLHEHIANLAGSPAIKKGILQTVKVVDELVKVMGRHKPENIVIEMARENQTTQKGQKNSRERMKRIEEGIKELGSQILKEHPVENTQLQNEKLYLYYLQNGRDMYVDQELDINRLSDYDVDAIVPQSFLKDDSIDNKVLTRSDKNRGKSDNVPSEEVVKKMKNYWRQLLNAKLITQRKFDNLTKAERGGLSELDKAGFIKRQLVETRQITKHVAQILDSRMNTKYDENDKLIREVKVITLKSKLVSDFRKDFQFYKVREINNYHHAHDAYLNAVVGTALIKKYPKLESEFVYGDYKVYDVRKMIAKSEQEIGKATAKYFFYSNIMNFFKTEITLANGEIRKRPLIETNGETGEIVWDKGRDFATVRKVLSMPQVNIVKKTEVQTGGFSKESILPKRNSDKLIARKKDWDPKKYGGFDSPTVAYSVLVVAKVEKGKSKKLKSVKELLGITIMERSSFEKNPIDFLEAKGYKEVKKDLIIKLPKYSLFELENGRKRMLASAGELQKGNELALPSKYVNFLYLASHYEKLKGSPEDNEQKQLFVEQHKHYLDEIIEQISEFSKRVILADANLDKVLSAYNKHRDKPIREQAENIIHLFTLTNLGAPAAFKYFDTTIDRKRYTSTKEVLDATLIHQSITGLYETRIDLSQLGGDPKKKRKVSGSETPGTSESATPESTGRTLVTFKDVFVDFTREEWKLLDTAQQIVYRNVMLENYKNLVSLGYQLTKPDVILRLEKGEEPSTEPSEGSAPGTSTEPSETGMRAHPGGGRCCPEQEEGESAAGGSGAGGDSAIEQGGQGSALAPSPVSGVRREGARGGGRGRGRWKQAGRGGGVCGRGRGRGRGRGRGRGRGRGRGRPPSGGSGLGGDGGGCGGGGSGGGGAPRREPVPFPSGSAGPGPRGPRATESGKRMDCPALPPGWKKEEVIRKSGLSAGKSDVYYFSPSGKKFRSKPQLARYLGNTVDLSSFDFRTGKMMPSKLQKNKQRLRNDPLNQNKGKPDLNTTLPIRQTASIFKQPVTKVTNHPSNKVKSDPQRMNEQPRQLFWEKRLQGLSASDVTEQIIKTMELPKGLQGVGPGSNDETLLSAVASALHTSSAPITGQVSAAVEKNPAVWLNTSQPLCKAFIVTDEDIRKQEERVQQVRKKLEEALMADILSRAADTEEMDIEMDSGDEA

SEQ ID NO: 1014 - protein, 2593 aa, synthetic construct
  REGION 1..2593: note = Description of Artificial Sequence: Synthetic polypeptide
MNHDQEFDPPKVYPPVPAEKRKPIRVLSLFDGIATGLLVLKDLGIQVDRYIASEVCEDSITVGMVRHQGKIMYVGDVRSVTQKHIQEWGPFDLVIGGSPCNDLSIVNPARKGLYEGTGRLFFEFYRLLHDARPKEGDDRPFFWLFENVVAMGVSDKRDISRFLESNPVMIDAKEVSAAHRARYFWGNLPGMNRPLASTVNDKLELQECLEHGRIAKFSKVRTITTRSNSIKQGKDQHFPVFMNEKEDILWCTEMERVFGFPVHYTDVSNMSRLARQRLLGRSWSVPVIRHLFAPLKEYFACVSSGNSNANSRGPSFSSGLVPLSLRGSHMGPMEIYKTVSAWKRQPVRVLSLFRNIDKVLKSLGFLESGSGSGGGTLKYVEDVTNVVRRDVEKWGPFDLVYGSTQPLGSSCDRCPGWYMFQFHRILQYALPRQESQRPFFWIFMDNLLLTEDDQETTTRFLQTEAVTLQDVRGRDYQNAMRVWSNIPGLKSKHAPLTPKEEEYLQAQVRSRSKLDAPKVDLLVKNCLLPLREYFKYFSQNSLPLGGPSSGAPPPSGGSPAGSPTSTEEGTSESATPESGPGTSTEPSEGSAPGSPAGSPTSTEEGTSTEPSEGSAPGTSTEPSEPKKKRKVYMDKKYSIGLAIGTNSVGWAVITDEYKVPSKKFKVLGNTDRHSIKKNLIGALLFDSGETAEATRLKRTARRRYTRRKNRICYLQEIFSNEMAKVDDSFFHRLEESFLVEEDKKHERHPIFGNIVDEVAYHEKYPTIYHLRKKLVDSTDKADLRLIYLALAHMIKFRGHFLIEGDLNPDNSDVDKLFIQLVQTYNQLFEENPINASGVDAKAILSARLSKSRRLENLIAQLPGEKKNGLFGNLIALSLGLTPNFKSNFDLAEDAKLQLSKDTYDDDLDNLLAQIGDQYADLFLAAKNLSDAILLSDILRVNTEITKAPLSASMIKRYDEHHQDLTLLKALVRQQLPEKYKEIFFDQSKNGYAGYIDGGASQEEFYKFIKPILEKMDGTEELLVKLNREDLLRKQRTFDNGSIPHQIHLGELHAILRRQEDFYPFLKDNREKIEKILTFRIPYYVGPLARGNSRFAWMTRKSEETITPWNFEEVVDKGASAQSFIERMTNFDKNLPNEKVLPKHSLLYEYFTVYNELTKVKYVTEGMRKPAFLSGEQKKAIVDLLFKTNRKVTVKQLKEDYFKKIECFDSVEISGVEDRFNASLGTYHDLLKIIKDKDFLDNEENEDILEDIVLTLTLFEDREMIEERLKTYAHLFDDKVMKQLKRRRYTGWGRLSRKLINGIRDKQSGKTILDFLKSDGFANRNFMQLIHDDSLTFKEDIQKAQVSGQGDSLHEHIANLAGSPAIKKGILQTVKVVDELVKVMGRHKPENIVIEMARENQTTQKGQKNSRERMKRIEEGIKELGSQILKEHPVENTQLQNEKLYLYYLQNGRDMYVDQELDINRLSDYDVDAIVPQSFLKDDSIDNKVLTRSDKNRGKSDNVPSEEVVKKMKNYWRQLLNAKLITQRKFDNLTKAERGGLSELDKAGFIKRQLVETRQITKHVAQILDSRMNTKYDENDKLIREVKVITLKSKLVSDFRKDFQFYKVREINNYHHAHDAYLNAVVGTALIKKYPKLESEFVYGDYKVYDVRKMIAKSEQEIGKATAKYFFYSNIMNFFKTEITLANGEIRKRPLIETNGETGEIVWDKGRDFATVRKVLSMPQVNIVKKTEVQTGGFSKESILPKRNSDKLIARKKDWDPKKYGGFDSPTVAYSVLVVAKVEKGKSKKLKSVKELLGITIMERSSFEKNPIDFLEAKGYKEVKKDLIIKLPKYSLFELENGRKRMLASAGELQKGNELALPSKYVNFLYLASHYEKLKGSPEDNEQKQLFVEQHKHYLDEIIEQISEFSKRVILADANLDKVLSAYNKHRDKPIREQAENIIHLFTLTNLGAPAAFKYFDTTIDRKRYTSTKEVLDATLIHQSITGLYETRIDLSQLGGDPKKKRKVSGSETPGTSESATPESTGRTLVTFKDVFVDFTREEWKLLDTAQQIVYRNVMLENYKNLVSLGYQLTKPDVILRLEKGEEPSTEPSEGSAPGTSTEPSETGMVAGMLGLREEKSEDQDLQGLKDKPLKFKKVKKDKKEEKEGKHEPVQPSAHHSAEPAEAGKAETSEGSGSAPAVPEASASPKQRRSIIRDRGPMYDDPTLPEGWTRKLKQRKSGRSAGKYDVYLINPQGKAFRSKVELIAYFEKVGDTSLDPNDFDFTVTGRGSPSRREQKPPKKPKSPKAPGTGRGRGRPKGSGTTRPKAATSEGVQVKRVLEKSPGKLLVKMPFQTSPGGKAEGGGATTSTQVMVIKRPGRKRKAEADPQAIPKKRGRKPGSVVAAAAAEAKKKAVKESSIRSVQETVLPIKKRKTRETVSIEVKEVVKPLLVSTLGEKSGKGLKTCKSPGRKSKESSPKGRSSSASSPPKKEHHHHHHHSESPKAPVPLLPPLPPPPPEPESSEDPTSPPEPQDLSSSVCKEEKMPRGGSLESDGCPKEPAKTQPAVATAATAAEKYKHRGEGERKDIVSSSMPRPNREEPVDSRTPVTERVS

SEQ ID NO: 1015 - protein, 2942 aa, synthetic construct
  REGION 1..2942: note = Description of Artificial Sequence: Synthetic polypeptide
MNHDQEFDPPKVYPPVPAEKRKPIRVLSLFDGIATGLLVLKDLGIQVDRYIASEVCEDSITVGMVRHQGKIMYVGDVRSVTQKHIQEWGPFDLVIGGSPCNDLSIVNPARKGLYEGTGRLFFEFYRLLHDARPKEGDDRPFFWLFENVVAMGVSDKRDISRFLESNPVMIDAKEVSAAHRARYFWGNLPGMNRPLASTVNDKLELQECLEHGRIAKFSKVRTITTRSNSIKQGKDQHFPVFMNEKEDILWCTEMERVFGFPVHYTDVSNMSRLARQRLLGRSWSVPVIRHLFAPLKEYFACVSSGNSNANSRGPSFSSGLVPLSLRGSHMGPMEIYKTVSAWKRQPVRVLSLFRNIDKVLKSLGFLESGSGSGGGTLKYVEDVTNVVRRDVEKWGPFDLVYGSTQPLGSSCDRCPGWYMFQFHRILQYALPRQESQRPFFWIFMDNLLLTEDDQETTTRFLQTEAVTLQDVRGRDYQNAMRVWSNIPGLKSKHAPLTPKEEEYLQAQVRSRSKLDAPKVDLLVKNCLLPLREYFKYFSQNSLPLGGPSSGAPPPSGGSPAGSPTSTEEGTSESATPESGPGTSTEPSEGSAPGSPAGSPTSTEEGTSTEPSEGSAPGTSTEPSEPKKKRKVYMDKKYSIGLAIGTNSVGWAVITDEYKVPSKKFKVLGNTDRHSIKKNLIGALLFDSGETAEATRLKRTARRRYTRRKNRICYLQEIFSNEMAKVDDSFFHRLEESFLVEEDKKHERHPIFGNIVDEVAYHEKYPTIYHLRKKLVDSTDKADLRLIYLALAHMIKFRGHFLIEGDLNPDNSDVDKLFIQLVQTYNQLFEENPINASGVDAKAILSARLSKSRRLENLIAQLPGEKKNGLFGNLIALSLGLTPNFKSNFDLAEDAKLQLSKDTYDDDLDNLLAQIGDQYADLFLAAKNLSDAILLSDILRVNTEITKAPLSASMIKRYDEHHQDLTLLKALVRQQLPEKYKEIFFDQSKNGYAGYIDGGASQEEFYKFIKPILEKMDGTEELLVKLNREDLLRKQRTFDNGSIPHQIHLGELHAILRRQEDFYPFLKDNREKIEKILTFRIPYYVGPLARGNSRFAWMTRKSEETITPWNFEEVVDKGASAQSFIERMTNFDKNLPNEKVLPKHSLLYEYFTVYNELTKVKYVTEGMRKPAFLSGEQKKAIVDLLFKTNRKVTVKQLKEDYFKKIECFDSVEISGVEDRFNASLGTYHDLLKIIKDKDFLDNEENEDILEDIVLTLTLFEDREMIEERLKTYAHLFDDKVMKQLKRRRYTGWGRLSRKLINGIRDKQSGKTILDFLKSDGFANRNFMQLIHDDSLTFKEDIQKAQVSGQGDSLHEHIANLAGSPAIKKGILQTVKVVDELVKVMGRHKPENIVIEMARENQTTQKGQKNSRERMKRIEEGIKELGSQILKEHPVENTQLQNEKLYLYYLQNGRDMYVDQELDINRLSDYDVDAIVPQSFLKDDSIDNKVLTRSDKNRGKSDNVPSEEVVKKMKNYWRQLLNAKLITQRKFDNLTKAERGGLSELDKAGFIKRQLVETRQITKHVAQILDSRMNTKYDENDKLIREVKVITLKSKLVSDFRKDFQFYKVREINNYHHAHDAYLNAVVGTALIKKYPKLESEFVYGDYKVYDVRKMIAKSEQEIGKATAKYFFYSNIMNFFKTEITLANGEIRKRPLIETNGETGEIVWDKGRDFATVRKVLSMPQVNIVKKTEVQTGGFSKESILPKRNSDKLIARKKDWDPKKYGGFDSPTVAYSVLVVAKVEKGKSKKLKSVKELLGITIMERSSFEKNPIDFLEAKGYKEVKKDLIIKLPKYSLFELENGRKRMLASAGELQKGNELALPSKYVNFLYLASHYEKLKGSPEDNEQKQLFVEQHKHYLDEIIEQISEFSKRVILADANLDKVLSAYNKHRDKPIREQAENIIHLFTLTNLGAPAAFKYFDTTIDRKRYTSTKEVLDATLIHQSITGLYETRIDLSQLGGDPKKKRKVSGSETPGTSESATPESTGRTLVTFKDVFVDFTREEWKLLDTAQQIVYRNVMLENYKNLVSLGYQLTKPDVILRLEKGEEPSTEPSEGSAPGTSTEPSETGMAASAAAASAAAASAASGSPGPGEGSAGGEKRSTAPSAAASASASAAASSPAGGGAEALELLEHCGVCRERLRPEREPRLLPCLHSACSACLGPAAPAAANSSGDGGAAGDGTVVDCPVCKQQCFSKDIVENYFMRDSGSKAATDAQDANQCCTSCEDNAPATSYCVECSEPLCETCVEAHQRVKYTKDHTVRSTGPAKSRDGERTVYCNVHKHEPLVLFCESCDTLTCRDCQLNAHKDHQYQFLEDAVRNQRKLLASLVKRLGDKHATLQKSTKEVRSSIRQVSDVQKRVQVDVKMAILQIMKELNKRGRVLVNDAQKVTEGQQERLERQHWTMTKIQKHQEHILRFASWALESDNNTALLLSKKLIYFQLHRALKMIVDPVEPHGEMKFQWDLNAWTKSAEAFGKIVAERPGTNSTGPAPMAPPRAPGPLSKQGSGSSQPMEVQEGYGFGSGDDPYSSAEPHVSGVKRSRSGEGEVSGLMRKVPRVSLERLDLDLTADSQPPVFKVFPGSTTEDYNLIVIERGAAAAATGQPGTAPAGTPGAPPLAGMAIVKEEETEAAIGAPPTATEGPETKPVLMALAEGPGAEGPRLASPSGSTSSGLEVVAPEGTSAPGGGPGTLDDSATICRVCQKPGDLVMCNQCEFCFHLDCHLPALQDVPGEEWSCSLCHVLPDLKEEDGSLSLDGADSTGVVAKLSPANQRKCERVLLALFCHEPCRPLHQLATDSTFSLDQPGGTLDLTLIRARLQEKLSPPYSSPQEFAQDVGRMFKQFNKLTEDKADVQSIIGLQRFFETRMNEAFGDTKFSAVLVEPPPMSLPGAGLSSQELSGGPGDGP

SEQ ID NO: 1016 - protein, 2298 aa, synthetic construct
  REGION 1..2298: note = Description of Artificial Sequence: Synthetic polypeptide
MNHDQEFDPPKVYPPVPAEKRKPIRVLSLFDGIATGLLVLKDLGIQVDRYIASEVCEDSITVGMVRHQGKIMYVGDVRSVTQKHIQEWGPFDLVIGGSPCNDLSIVNPARKGLYEGTGRLFFEFYRLLHDARPKEGDDRPFFWLFENVVAMGVSDKRDISRFLESNPVMIDAKEVSAAHRARYFWGNLPGMNRPLASTVNDKLELQECLEHGRIAKFSKVRTITTRSNSIKQGKDQHFPVFMNEKEDILWCTEMERVFGFPVHYTDVSNMSRLARQRLLGRSWSVPVIRHLFAPLKEYFACVSSGNSNANSRGPSFSSGLVPLSLRGSHMGPMEIYKTVSAWKRQPVRVLSLFRNIDKVLKSLGFLESGSGSGGGTLKYVEDVTNVVRRDVEKWGPFDLVYGSTQPLGSSCDRCPGWYMFQFHRILQYALPRQESQRPFFWIFMDNLLLTEDDQETTTRFLQTEAVTLQDVRGRDYQNAMRVWSNIPGLKSKHAPLTPKEEEYLQAQVRSRSKLDAPKVDLLVKNCLLPLREYFKYFSQNSLPLGGPSSGAPPPSGGSPAGSPTSTEEGTSESATPESGPGTSTEPSEGSAPGSPAGSPTSTEEGTSTEPSEGSAPGTSTEPSEPKKKRKVYMDKKYSIGLAIGTNSVGWAVITDEYKVPSKKFKVLGNTDRHSIKKNLIGALLFDSGETAEATRLKRTARRRYTRRKNRICYLQEIFSNEMAKVDDSFFHRLEESFLVEEDKKHERHPIFGNIVDEVAYHEKYPTIYHLRKKLVDSTDKADLRLIYLALAHMIKFRGHFLIEGDLNPDNSDVDKLFIQLVQTYNQLFEENPINASGVDAKAILSARLSKSRRLENLIAQLPGEKKNGLFGNLIALSLGLTPNFKSNFDLAEDAKLQLSKDTYDDDLDNLLAQIGDQYADLFLAAKNLSDAILLSDILRVNTEITKAPLSASMIKRYDEHHQDLTLLKALVRQQLPEKYKEIFFDQSKNGYAGYIDGGASQEEFYKFIKPILEKMDGTEELLVKLNREDLLRKQRTFDNGSIPHQIHLGELHAILRRQEDFYPFLKDNREKIEKILTFRIPYYVGPLARGNSRFAWMTRKSEETITPWNFEEVVDKGASAQSFIERMTNFDKNLPNEKVLPKHSLLYEYFTVYNELTKVKYVTEGMRKPAFLSGEQKKAIVDLLFKTNRKVTVKQLKEDYFKKIECFDSVEISGVEDRFNASLGTYHDLLKIIKDKDFLDNEENEDILEDIVLTLTLFEDREMIEERLKTYAHLFDDKVMKQLKRRRYTGWGRLSRKLINGIRDKQSGKTILDFLKSDGFANRNFMQLIHDDSLTFKEDIQKAQVSGQGDSLHEHIANLAGSPAIKKGILQTVKVVDELVKVMGRHKPENIVIEMARENQTTQKGQKNSRERMKRIEEGIKELGSQILKEHPVENTQLQNEKLYLYYLQNGRDMYVDQELDINRLSDYDVDAIVPQSFLKDDSIDNKVLTRSDKNRGKSDNVPSEEVVKKMKNYWRQLLNAKLITQRKFDNLTKAERGGLSELDKAGFIKRQLVETRQITKHVAQILDSRMNTKYDENDKLIREVKVITLKSKLVSDFRKDFQFYKVREINNYHHAHDAYLNAVVGTALIKKYPKLESEFVYGDYKVYDVRKMIAKSEQEIGKATAKYFFYSNIMNFFKTEITLANGEIRKRPLIETNGETGEIVWDKGRDFATVRKVLSMPQVNIVKKTEVQTGGFSKESILPKRNSDKLIARKKDWDPKKYGGFDSPTVAYSVLVVAKVEKGKSKKLKSVKELLGITIMERSSFEKNPIDFLEAKGYKEVKKDLIIKLPKYSLFELENGRKRMLASAGELQKGNELALPSKYVNFLYLASHYEKLKGSPEDNEQKQLFVEQHKHYLDEIIEQISEFSKRVILADANLDKVLSAYNKHRDKPIREQAENIIHLFTLTNLGAPAAFKYFDTTIDRKRYTSTKEVLDATLIHQSITGLYETRIDLSQLGGDPKKKRKVSGSETPGTSESATPESTGRTLVTFKDVFVDFTREEWKLLDTAQQIVYRNVMLENYKNLVSLGYQLTKPDVILRLEKGEEPSTEPSEGSAPGTSTEPSETGMGKKTKRTADSSSSEDEEEYVVEKVLDRRVVKGQVEYLLKWKGFSEEHNTWEPEKNLDCPELISEFMKKYKKMKEGENNKPREKSESNKRKSNFSNSADDIKSKKKREQSNDIARGFERGLEPEKIIGATDSCGDLMFLMKWKGTDEADLVLAKEANVKCPQIVIAFYEERLTWHAYPEDAENKEKETAKS

SEQ ID NO: 1017 - protein, 2292 aa, synthetic construct
  REGION 1..2292: note = Description of Artificial Sequence: Synthetic polypeptide
MNHDQEFDPPKVYPPVPAEKRKPIRVLSLFDGIATGLLVLKDLGIQVDRYIASEVCEDSITVGMVRHQGKIMYVGDVRSVTQKHIQEWGPFDLVIGGSPCNDLSIVNPARKGLYEGTGRLFFEFYRLLHDARPKEGDDRPFFWLFENVVAMGVSDKRDISRFLESNPVMIDAKEVSAAHRARYFWGNLPGMNRPLASTVNDKLELQECLEHGRIAKFSKVRTITTRSNSIKQGKDQHFPVFMNEKEDILWCTEMERVFGFPVHYTDVSNMSRLARQRLLGRSWSVPVIRHLFAPLKEYFACVSSGNSNANSRGPSFSSGLVPLSLRGSHMGPMEIYKTVSAWKRQPVRVLSLFRNIDKVLKSLGFLESGSGSGGGTLKYVEDVTNVVRRDVEKWGPFDLVYGSTQPLGSSCDRCPGWYMFQFHRILQYALPRQESQRPFFWIFMDNLLLTEDDQETTTRFLQTEAVTLQDVRGRDYQNAMRVWSNIPGLKSKHAPLTPKEEEYLQAQVRSRSKLDAPKVDLLVKNCLLPLREYFKYFSQNSLPLGGPSSGAPPPSGGSPAGSPTSTEEGTSESATPESGPGTSTEPSEGSAPGSPAGSPTSTEEGTSTEPSEGSAPGTSTEPSEPKKKRKVYMDKKYSIGLAIGTNSVGWAVITDEYKVPSKKFKVLGNTDRHSIKKNLIGALLFDSGETAEATRLKRTARRRYTRRKNRICYLQEIFSNEMAKVDDSFFHRLEESFLVEEDKKHERHPIFGNIVDEVAYHEKYPTIYHLRKKLVDSTDKADLRLIYLALAHMIKFRGHFLIEGDLNPDNSDVDKLFIQLVQTYNQLFEENPINASGVDAKAILSARLSKSRRLENLIAQLPGEKKNGLFGNLIALSLGLTPNFKSNFDLAEDAKLQLSKDTYDDDLDNLLAQIGDQYADLFLAAKNLSDAILLSDILRVNTEITKAPLSASMIKRYDEHHQDLTLLKALVRQQLPEKYKEIFFDQSKNGYAGYIDGGASQEEFYKFIKPILEKMDGTEELLVKLNREDLLRKQRTFDNGSIPHQIHLGELHAILRRQEDFYPFLKDNREKIEKILTFRIPYYVGPLARGNSRFAWMTRKSEETITPWNFEEVVDKGASAQSFIERMTNFDKNLPNEKVLPKHSLLYEYFTVYNELTKVKYVTEGMRKPAFLSGEQKKAIVDLLFKTNRKVTVKQLKEDYFKKIECFDSVEISGVEDRFNASLGTYHDLLKIIKDKDFLDNEENEDILEDIVLTLTLFEDREMIEERLKTYAHLFDDKVMKQLKRRRYTGWGRLSRKLINGIRDKQSGKTILDFLKSDGFANRNFMQLIHDDSLTFKEDIQKAQVSGQGDSLHEHIANLAGSPAIKKGILQTVKVVDELVKVMGRHKPENIVIEMARENQTTQKGQKNSRERMKRIEEGIKELGSQILKEHPVENTQLQNEKLYLYYLQNGRDMYVDQELDINRLSDYDVDAIVPQSFLKDDSIDNKVLTRSDKNRGKSDNVPSEEVVKKMKNYWRQLLNAKLITQRKFDNLTKAERGGLSELDKAGFIKRQLVETRQITKHVAQILDSRMNTKYDENDKLIREVKVITLKSKLVSDFRKDFQFYKVREINNYHHAHDAYLNAVVGTALIKKYPKLESEFVYGDYKVYDVRKMIAKSEQEIGKATAKYFFYSNIMNFFKTEITLANGEIRKRPLIETNGETGEIVWDKGRDFATVRKVLSMPQVNIVKKTEVQTGGFSKESILPKRNSDKLIARKKDWDPKKYGGFDSPTVAYSVLVVAKVEKGKSKKLKSVKELLGITIMERSSFEKNPIDFLEAKGYKEVKKDLIIKLPKYSLFELENGRKRMLASAGELQKGNELALPSKYVNFLYLASHYEKLKGSPEDNEQKQLFVEQHKHYLDEIIEQISEFSKRVILADANLDKVLSAYNKHRDKPIREQAENIIHLFTLTNLGAPAAFKYFDTTIDRKRYTSTKEVLDATLIHQSITGLYETRIDLSQLGGDPKKKRKVSGSETPGTSESATPESTGRTLVTFKDVFVDFTREEWKLLDTAQQIVYRNVMLENYKNLVSLGYQLTKPDVILRLEKGEEPSTEPSEGSAPGTSTEPSETGMGKKQNKKKVEEVLEEEEEEYVVEKVLDRRVVKGKVEYLLKWKGFSDEDNTWEPEENLDCPDLIAEFLQSQKTAHETDKSEGGKRKADSDSEDKGEESKPKKKKEESEKPRGFARGLEPERIIGATDSSGELMFLMKWKNSDEADLVPAKEANVKCPQVVISFYEERLTWHSYPSEDDDKKDDKN

SEQ ID NO: 1018 - protein, 2548 aa, synthetic construct
  REGION 1..2548: note = Description of Artificial Sequence: Synthetic polypeptide
MNHDQEFDPPKVYPPVPAEKRKPIRVLSLFDGIATGLLVLKDLGIQVDRYIASEVCEDSITVGMVRHQGKIMYVGDVRSVTQKHIQEWGPFDLVIGGSPCNDLSIVNPARKGLYEGTGRLFFEFYRLLHDARPKEGDDRPFFWLFENVVAMGVSDKRDISRFLESNPVMIDAKEVSAAHRARYFWGNLPGMNRPLASTVNDKLELQECLEHGRIAKFSKVRTITTRSNSIKQGKDQHFPVFMNEKEDILWCTEMERVFGFPVHYTDVSNMSRLARQRLLGRSWSVPVIRHLFAPLKEYFACVSSGNSNANSRGPSFSSGLVPLSLRGSHMGPMEIYKTVSAWKRQPVRVLSLFRNIDKVLKSLGFLESGSGSGGGTLKYVEDVTNVVRRDVEKWGPFDLVYGSTQPLGSSCDRCPGWYMFQFHRILQYALPRQESQRPFFWIFMDNLLLTEDDQETTTRFLQTEAVTLQDVRGRDYQNAMRVWSNIPGLKSKHAPLTPKEEEYLQAQVRSRSKLDAPKVDLLVKNCLLPLREYFKYFSQNSLPLGGPSSGAPPPSGGSPAGSPTSTEEGTSESATPESGPGTSTEPSEGSAPGSPAGSPTSTEEGTSTEPSEGSAPGTSTEPSEPKKKRKVYMDKKYSIGLAIGTNSVGWAVITDEYKVPSKKFKVLGNTDRHSIKKNLIGALLFDSGETAEATRLKRTARRRYTRRKNRICYLQEIFSNEMAKVDDSFFHRLEESFLVEEDKKHERHPIFGNIVDEVAYHEKYPTIYHLRKKLVDSTDKADLRLIYLALAHMIKFRGHFLIEGDLNPDNSDVDKLFIQLVQTYNQLFEENPINASGVDAKAILSARLSKSRRLENLIAQLPGEKKNGLFGNLIALSLGLTPNFKSNFDLAEDAKLQLSKDTYDDDLDNLLAQIGDQYADLFLAAKNLSDAILLSDILRVNTEITKAPLSASMIKRYDEHHQDLTLLKALVRQQLPEKYKEIFFDQSKNGYAGYIDGGASQEEFYKFIKPILEKMDGTEELLVKLNREDLLRKQRTFDNGSIPHQIHLGELHAILRRQEDFYPFLKDNREKIEKILTFRIPYYVGPLARGNSRFAWMTRKSEETITPWNFEEVVDKGASAQSFIERMTNFDKNLPNEKVLPKHSLLYEYFTVYNELTKVKYVTEGMRKPAFLSGEQKKAIVDLLFKTNRKVTVKQLKEDYFKKIECFDSVEISGVEDRFNASLGTYHDLLKIIKDKDFLDNEENEDILEDIVLTLTLFEDREMIEERLKTYAHLFDDKVMKQLKRRRYTGWGRLSRKLINGIRDKQSGKTILDFLKSDGFANRNFMQLIHDDSLTFKEDIQKAQVSGQGDSLHEHIANLAGSPAIKKGILQTVKVVDELVKVMGRHKPENIVIEMARENQTTQKGQKNSRERMKRIEEGIKELGSQILKEHPVENTQLQNEKLYLYYLQNGRDMYVDQELDINRLSDYDVDAIVPQSFLKDDSIDNKVLTRSDKNRGKSDNVPSEEVVKKMKNYWRQLLNAKLITQRKFDNLTKAERGGLSELDKAGFIKRQLVETRQITKHVAQILDSRMNTKYDENDKLIREVKVITLKSKLVSDFRKDFQFYKVREINNYHHAHDAYLNAVVGTALIKKYPKLESEFVYGDYKVYDVRKMIAKSEQEIGKATAKYFFYSNIMNFFKTEITLANGEIRKRPLIETNGETGEIVWDKGRDFATVRKVLSMPQVNIVKKTEVQTGGFSKESILPKRNSDKLIARKKDWDPKKYGGFDSPTVAYSVLVVAKVEKGKSKKLKSVKELLGITIMERSSFEKNPIDFLEAKGYKEVKKDLIIKLPKYSLFELENGRKRMLASAGELQKGNELALPSKYVNFLYLASHYEKLKGSPEDNEQKQLFVEQHKHYLDEIIEQISEFSKRVILADANLDKVLSAYNKHRDKPIREQAENIIHLFTLTNLGAPAAFKYFDTTIDRKRYTSTKEVLDATLIHQSITGLYETRIDLSQLGGDPKKKRKVSGSETPGTSESATPESTGRTLVTFKDVFVDFTREEWKLLDTAQQIVYRNVMLENYKNLVSLGYQLTKPDVILRLEKGEEPSTEPSEGSAPGTSTEPSETGMSEREVSTAPAGTDMPAAKKQKLSSDENSNPDLSGDENDDAVSIESGTNTERPDTPTNTPNAPGRKSWGKGKWKSKKCKYSFKCVNSLKEDHNQPLFGVQFNWHSKEGDPLVFATVGSNRVTLYECHSQGEIRLLQSYVDADADENFYTCAWTYDSNTSHPLLAVAGSRGIIRIINPITMQCIKHYVGHGNAINELKFHPRDPNLLLSVSKDHALRLWNIQTDTLVAIFGGVEGHRDEVLSADYDLLGEKIMSCGMDHSLKLWRINSKRMMNAIKESYDYNPNKTNRPFISQKIHFPDFSTRDIHRNYVDCVRWLGDLILSKSCENAIVCWKPGKMEDDIDKIKPSESNVTILGRFDYSQCDIWYMRFSMDFWQKMLALGNQVGKLYVWDLEVEDPHKAKCTTLTHHKCGAAIRQTSFSRDSSILIAVCDDASIWRWDRLR

SEQ ID NO: 1019 - protein, 2532 aa, synthetic construct
  REGION 1..2532: note = Description of Artificial Sequence: Synthetic polypeptide
MNHDQEFDPPKVYPPVPAEKRKPIRVLSLFDGIATGLLVLKDLGIQVDRYIASEVCEDSITVGMVRHQGKIMYVGDVRSVTQKHIQEWGPFDLVIGGSPCNDLSIVNPARKGLYEGTGRLFFEFYRLLHDARPKEGDDRPFFWLFENVVAMGVSDKRDISRFLESNPVMIDAKEVSAAHRARYFWGNLPGMNRPLASTVNDKLELQECLEHGRIAKFSKVRTITTRSNSIKQGKDQHFPVFMNEKEDILWCTEMERVFGFPVHYTDVSNMSRLARQRLLGRSWSVPVIRHLFAPLKEYFACVSSGNSNANSRGPSFSSGLVPLSLRGSHMGPMEIYKTVSAWKRQPVRVLSLFRNIDKVLKSLGFLESGSGSGGGTLKYVEDVTNVVRRDVEKWGPFDLVYGSTQPLGSSCDRCPGWYMFQFHRILQYALPRQESQRPFFWIFMDNLLLTEDDQETTTRFLQTEAVTLQDVRGRDYQNAMRVWSNIPGLKSKHAPLTPKEEEYLQAQVRSRSKLDAPKVDLLVKNCLLPLREYFKYFSQNSLPLGGPSSGAPPPSGGSPAGSPTSTEEGTSESATPESGPGTSTEPSEGSAPGSPAGSPTSTEEGTSTEPSEGSAPGTSTEPSEPKKKRKVYMDKKYSIGLAIGTNSVGWAVITDEYKVPSKKFKVLGNTDRHSIKKNLIGALLFDSGETAEATRLKRTARRRYTRRKNRICYLQEIFSNEMAKVDDSFFHRLEESFLVEEDKKHERHPIFGNIVDEVAYHEKYPTIYHLRKKLVDSTDKADLRLIYLALAHMIKFRGHFLIEGDLNPDNSDVDKLFIQLVQTYNQLFEENPINASGVDAKAILSARLSKSRRLENLIAQLPGEKKNGLFGNLIALSLGLTPNFKSNFDLAEDAKLQLSKDTYDDDLDNLLAQIGDQYADLFLAAKNLSDAILLSDILRVNTEITKAPLSASMIKRYDEHHQDLTLLKALVRQQLPEKYKEIFFDQSKNGYAGYIDGGASQEEFYKFIKPILEKMDGTEELLVKLNREDLLRKQRTFDNGSIPHQIHLGELHAILRRQEDFYPFLKDNREKIEKILTFRIPYYVGPLARGNSRFAWMTRKSEETITPWNFEEVVDKGASAQSFIERMTNFDKNLPNEKVLPKHSLLYEYFTVYNELTKVKYVTEGMRKPAFLSGEQKKAIVDLLFKTNRKVTVKQLKEDYFKKIECFDSVEISGVEDRFNASLGTYHDLLKIIKDKDFLDNEENEDILEDIVLTLTLFEDREMIEERLKTYAHLFDDKVMKQLKRRRYTGWGRLSRKLINGIRDKQSGKTILDFLKSDGFANRNFMQLIHDDSLTFKEDIQKAQVSGQGDSLHEHIANLAGSPAIKKGILQTVKVVDELVKVMGRHKPENIVIEMARENQTTQKGQKNSRERMKRIEEGIKELGSQILKEHPVENTQLQNEKLYLYYLQNGRDMYVDQELDINRLSDYDVDAIVPQSFLKDDSIDNKVLTRSDKNRGKSDNVPSEEVVKKMKNYWRQLLNAKLITQRKFDNLTKAERGGLSELDKAGFIKRQLVETRQITKHVAQILDSRMNTKYDENDKLIREVKVITLKSKLVSDFRKDFQFYKVREINNYHHAHDAYLNAVVGTALIKKYPKLESEFVYGDYKVYDVRKMIAKSEQEIGKATAKYFFYSNIMNFFKTEITLANGEIRKRPLIETNGETGEIVWDKGRDFATVRKVLSMPQVNIVKKTEVQTGGFSKESILPKRNSDKLIARKKDWDPKKYGGFDSPTVAYSVLVVAKVEKGKSKKLKSVKELLGITIMERSSFEKNPIDFLEAKGYKEVKKDLIIKLPKYSLFELENGRKRMLASAGELQKGNELALPSKYVNFLYLASHYEKLKGSPEDNEQKQLFVEQHKHYLDEIIEQISEFSKRVILADANLDKVLSAYNKHRDKPIREQAENIIHLFTLTNLGAPAAFKYFDTTIDRKRYTSTKEVLDATLIHQSITGLYETRIDLSQLGGDPKKKRKVSGSETPGTSESATPESTGRTLVTFKDVFVDFTREEWKLLDTAQQIVYRNVMLENYKNLVSLGYQLTKPDVILRLEKGEEPSTEPSEGSAPGTSTEPSETGMADKEAAFDDAVEERVINEEYKIWKKNTPFLYDLVMTHALEWPSLTAQWLPDVTRPEGKDFSIHRLVLGTHTSDEQNHLVIASVQLPNDDAQFDASHYDSEKGEFGGFGSVSGKIEIEIKINHEGEVNRARYMPQNPCIIATKTPSSDVLVFDYTKHPSKPDPSGECNPDLRLRGHQKEGYGLSWNPNLSGHLLSASDDHTICLWDISAVPKEGKVVDAKTIFTGHTAVVEDVSWHLLHESLFGSVADDQKLMIWDTRSNNTSKPSHSVDAHTAEVNCLSFNPYSEFILATGSADKTVALWDLRNLKLKLHSFESHKDEIFQVQWSPHNETILASSGTDRRLNVWDLSKIGEEQSPEDAEDGPPELLFIHGGHTAKISDFSWNPNEPWVICSVSEDNIMQVWQMAENIYNDEDPEGSVDPEGQGS

SEQ ID NO: 1020 - protein, 2592 aa, synthetic construct
  REGION 1..2592: note = Description of Artificial Sequence: Synthetic polypeptide
MNHDQEFDPPKVYPPVPAEKRKPIRVLSLFDGIATGLLVLKDLGIQVDRYIASEVCEDSITVGMVRHQGKIMYVGDVRSVTQKHIQEWGPFDLVIGGSPCNDLSIVNPARKGLYEGTGRLFFEFYRLLHDARPKEGDDRPFFWLFENVVAMGVSDKRDISRFLESNPVMIDAKEVSAAHRARYFWGNLPGMNRPLASTVNDKLELQECLEHGRIAKFSKVRTITTRSNSIKQGKDQHFPVFMNEKEDILWCTEMERVFGFPVHYTDVSNMSRLARQRLLGRSWSVPVIRHLFAPLKEYFACVSSGNSNANSRGPSFSSGLVPLSLRGSHMGPMEIYKTVSAWKRQPVRVLSLFRNIDKVLKSLGFLESGSGSGGGTLKYVEDVTNVVRRDVEKWGPFDLVYGSTQPLGSSCDRCPGWYMFQFHRILQYALPRQESQRPFFWIFMDNLLLTEDDQETTTRFLQTEAVTLQDVRGRDYQNAMRVWSNIPGLKSKHAPLTPKEEEYLQAQVRSRSKLDAPKVDLLVKNCLLPLREYFKYFSQNSLPLGGPSSGAPPPSGGSPAGSPTSTEEGTSESATPESGPGTSTEPSEGSAPGSPAGSPTSTEEGTSTEPSEGSAPGTSTEPSEPKKKRKVYMDKKYSIGLAIGTNSVGWAVITDEYKVPSKKFKVLGNTDRHSIKKNLIGALLFDSGETAEATRLKRTARRRYTRRKNRICYLQEIFSNEMAKVDDSFFHRLEESFLVEEDKKHERHPIFGNIVDEVAYHEKYPTIYHLRKKLVDSTDKADLRLIYLALAHMIKFRGHFLIEGDLNPDNSDVDKLFIQLVQTYNQLFEENPINASGVDAKAILSARLSKSRRLENLIAQLPGEKKNGLFGNLIALSLGLTPNFKSNFDLAEDAKLQLSKDTYDDDLDNLLAQIGDQYADLFLAAKNLSDAILLSDILRVNTEITKAPLSASMIKRYDEHHQDLTLLKALVRQQLPEKYKEIFFDQSKNGYAGYIDGGASQEEFYKFIKPILEKMDGTEELLVKLNREDLLRKQRTFDNGSIPHQIHLGELHAILRRQEDFYPFLKDNREKIEKILTFRIPYYVGPLARGNSRFAWMTRKSEETITPWNFEEVVDKGASAQSFIERMTNFDKNLPNEKVLPKHSLLYEYFTVYNELTKVKYVTEGMRKPAFLSGEQKKAIVDLLFKTNRKVTVKQLKEDYFKKIECFDSVEISGVEDRFNASLGTYHDLLKIIKDKDFLDNEENEDILEDIVLTLTLFEDREMIEERLKTYAHLFDDKVMKQLKRRRYTGWGRLSRKLINGIRDKQSGKTILDFLKSDGFANRNFMQLIHDDSLTFKEDIQKAQVSGQGDSLHEHIANLAGSPAIKKGILQTVKVVDELVKVMGRHKPENIVIEMARENQTTQKGQKNSRERMKRIEEGIKELGSQILKEHPVENTQLQNEKLYLYYLQNGRDMYVDQELDINRLSDYDVDAIVPQSFLKDDSIDNKVLTRSDKNRGKSDNVPSEEVVKKMKNYWRQLLNAKLITQRKFDNLTKAERGGLSELDKAGFIKRQLVETRQITKHVAQILDSRMNTKYDENDKLIREVKVITLKSKLVSDFRKDFQFYKVREINNYHHAHDAYLNAVVGTALIKKYPKLESEFVYGDYKVYDVRKMIAKSEQEIGKATAKYFFYSNIMNFFKTEITLANGEIRKRPLIETNGETGEIVWDKGRDFATVRKVLSMPQVNIVKKTEVQTGGFSKESILPKRNSDKLIARKKDWDPKKYGGFDSPTVAYSVLVVAKVEKGKSKKLKSVKELLGITIMERSSFEKNPIDFLEAKGYKEVKKDLIIKLPKYSLFELENGRKRMLASAGELQKGNELALPSKYVNFLYLASHYEKLKGSPEDNEQKQLFVEQHKHYLDEIIEQISEFSKRVILADANLDKVLSAYNKHRDKPIREQAENIIHLFTLTNLGAPAAFKYFDTTIDRKRYTSTKEVLDATLIHQSITGLYETRIDLSQLGGDPKKKRKVSGSETPGTSESATPESTGRTLVTFKDVFVDFTREEWKLLDTAQQIVYRNVMLENYKNLVSLGYQLTKPDVILRLEKGEEPSTEPSEGSAPGTSTEPSETGMPAMVEKGPEVSGKRRGRNNAAASASAAAASAAASAACASPAATAASGAAASSASAAAASAAAAPNNGQNKSLAAAAPNGNSSSNSWEEGSSGSSSDEEHGGGGMRVGPQYQAVVPDFDPAKLARRSQERDNLGMLVWSPNQNLSEAKLDEYIAIAKEKHGYNMEQALGMLFWHKHNIEKSLADLPNFTPFPDEWTVEDKVLFEQAFSFHGKTFHRIQQMLPDKSIASLVKFYYSWKKTRTKTSVMDRHARKQKREREESEDELEEANGNNPIDIEVDQNKESKKEVPPTETVPQVKKEKHSTQAKNRAKRKPPKGMFLSQEDVEAVSANATAATTVLRQLDMELVSVKRQIQNIKQTNSALKEKLDGGIEPYRLPEVIQKCNARWTTEEQLLAVQAIRKYGRDFQAISDVIGNKSVVQVKNFFVNYRRRFNIDEVLQEWEAEHGKEETNGPSNQKPVKSPDNSIKMPEEEDEAPVLDVRYASAS

SEQ ID NO: 1021 - protein, 2853 aa, synthetic construct
  REGION 1..2853: note = Description of Artificial Sequence: Synthetic polypeptide
MNHDQEFDPPKVYPPVPAEKRKPIRVLSLFDGIATGLLVLKDLGIQVDRYIASEVCEDSITVGMVRHQGKIMYVGDVRSVTQKHIQEWGPFDLVIGGSPCNDLSIVNPARKGLYEGTGRLFFEFYRLLHDARPKEGDDRPFFWLFENVVAMGVSDKRDISRFLESNPVMIDAKEVSAAHRARYFWGNLPGMNRPLASTVNDKLELQECLEHGRIAKFSKVRTITTRSNSIKQGKDQHFPVFMNEKEDILWCTEMERVFGFPVHYTDVSNMSRLARQRLLGRSWSVPVIRHLFAPLKEYFACVSSGNSNANSRGPSFSSGLVPLSLRGSHMGPMEIYKTVSAWKRQPVRVLSLFRNIDKVLKSLGFLESGSGSGGGTLKYVEDVTNVVRRDVEKWGPFDLVYGSTQPLGSSCDRCPGWYMFQFHRILQYALPRQESQRPFFWIFMDNLLLTEDDQETTTRFLQTEAVTLQDVRGRDYQNAMRVWSNIPGLKSKHAPLTPKEEEYLQAQVRSRSKLDAPKVDLLVKNCLLPLREYFKYFSQNSLPLGGPSSGAPPPSGGSPAGSPTSTEEGTSESATPESGPGTSTEPSEGSAPGSPAGSPTSTEEGTSTEPSEGSAPGTSTEPSEPKKKRKVYMDKKYSIGLAIGTNSVGWAVITDEYKVPSKKFKVLGNTDRHSIKKNLIGALLFDSGETAEATRLKRTARRRYTRRKNRICYLQEIFSNEMAKVDDSFFHRLEESFLVEEDKKHERHPIFGNIVDEVAYHEKYPTIYHLRKKLVDSTDKADLRLIYLALAHMIKFRGHFLIEGDLNPDNSDVDKLFIQLVQTYNQLFEENPINASGVDAKAILSARLSKSRRLENLIAQLPGEKKNGLFGNLIALSLGLTPNFKSNFDLAEDAKLQLSKDTYDDDLDNLLAQIGDQYADLFLAAKNLSDAILLSDILRVNTEITKAPLSASMIKRYDEHHQDLTLLKALVRQQLPEKYKEIFFDQSKNGYAGYIDGGASQEEFYKFIKPILEKMDGTEELLVKLNREDLLRKQRTFDNGSIPHQIHLGELHAILRRQEDFYPFLKDNREKIEKILTFRIPYYVGPLARGNSRFAWMTRKSEETITPWNFEEVVDKGASAQSFIERMTNFDKNLPNEKVLPKHSLLYEYFTVYNELTKVKYVTEGMRKPAFLSGEQKKAIVDLLFKTNRKVTVKQLKEDYFKKIECFDSVEISGVEDRFNASLGTYHDLLKIIKDKDFLDNEENEDILEDIVLTLTLFEDREMIEERLKTYAHLFDDKVMKQLKRRRYTGWGRLSRKLINGIRDKQSGKTILDFLKSDGFANRNFMQLIHDDSLTFKEDIQKAQVSGQGDSLHEHIANLAGSPAIKKGILQTVKVVDELVKVMGRHKPENIVIEMARENQTTQKGQKNSRERMKRIEEGIKELGSQILKEHPVENTQLQNEKLYLYYLQNGRDMYVDQELDINRLSDYDVDAIVPQSFLKDDSIDNKVLTRSDKNRGKSDNVPSEEVVKKMKNYWRQLLNAKLITQRKFDNLTKAERGGLSELDKAGFIKRQLVETRQITKHVAQILDSRMNTKYDENDKLIREVKVITLKSKLVSDFRKDFQFYKVREINNYHHAHDAYLNAVVGTALIKKYPKLESEFVYGDYKVYDVRKMIAKSEQEIGKATAKYFFYSNIMNFFKTEITLANGEIRKRPLIETNGETGEIVWDKGRDFATVRKVLSMPQVNIVKKTEVQTGGFSKESILPKRNSDKLIARKKDWDPKKYGGFDSPTVAYSVLVVAKVEKGKSKKLKSVKELLGITIMERSSFEKNPIDFLEAKGYKEVKKDLIIKLPKYSLFELENGRKRMLASAGELQKGNELALPSKYVNFLYLASHYEKLKGSPEDNEQKQLFVEQHKHYLDEIIEQISEFSKRVILADANLDKVLSAYNKHRDKPIREQAENIIHLFTLTNLGAPAAFKYFDTTIDRKRYTSTKEVLDATLIHQSITGLYETRIDLSQLGGDPKKKRKVSGSETPGTSESATPESTGRTLVTFKDVFVDFTREEWKLLDTAQQIVYRNVMLENYKNLVSLGYQLTKPDVILRLEKGEEPSTEPSEGSAPGTSTEPSETGMGQTGKKSEKGPVCWRKRVKSEYMRLRQLKRFRRADEVKSMFSSNRQKILERTEILNQEWKQRRIQPVHILTSVSSLRGTRECSVTSDLDFPTQVIPLKTLNAVASVPIMYSWSPLQQNFMVEDETVLHNIPYMGDEVLDQDGTFIEELIKNYDGKVHGDRECGFINDEIFVELVNALGQYNDDDDDDDGDDPEEREEKQKDLEDHRDDKESRPPRKFPSDKIFEAISSMFPDKGTAEELKEKYKELTEQQLPGALPPECTPNIDGPNAKSVQREQSLHSFHTLFCRRCFKYDCFLHPFHATPNTYKRKNTETALDNKPCGPQCYQHLEGAKEFAAALTAERIKTPPKRPGGRRRGRLPNNSSRPSTPTINVLESKDTDSDREAGTETGGENNDKEEEEKKDETSSSSEANSRCQTPIKMKPNIEPPENVEWSGAEASMFRVLIGTYYDNFCAIARLIGTKTCRQVYEFRVKESSIIAPAPAEDVDTPPRKKKRKHRLWAAHCRKIQLKKDGSSNHVYNYQPCDHPRQPCDSSCPCVIAQNFCEKFCQCSSECQNRFPGCRCKAQCNTKQCPCYLAVRECDPDLCLTCGAADHWDSKNVSCKNCSIQRGSKKHLLLAPSDVAGWGIFIKDPVQKNEFISEYCGEIISQDEADRRGKVYDKYMCSFLFNLNNDFVVDATRKGNKIRFANHSVNPNCYAKVMMVNGDHRIGIFAKRAIQTGEELFFDYRYSQADALKYVGIEREMEIP

SEQ ID NO: 1022 - protein, 1567 aa, synthetic construct
  REGION 1..1567: note = Description of Artificial Sequence: Synthetic polypeptide
MGTPKKKRKVMDKKYSIGLAIGTNSVGWAVITDEYKVPSKKFKVLGNTDRHSIKKNLIGALLFDSGETAEATRLKRTARRRYTRRKNRICYLQEIFSNEMAKVDDSFFHRLEESFLVEEDKKHERHPIFGNIVDEVAYHEKYPTIYHLRKKLVDSTDKADLRLIYLALAHMIKFRGHFLIEGDLNPDNSDVDKLFIQLVQTYNQLFEENPINASGVDAKAILSARLSKSRRLENLIAQLPGEKKNGLFGNLIALSLGLTPNFKSNFDLAEDAKLQLSKDTYDDDLDNLLAQIGDQYADLFLAAKNLSDAILLSDILRVNTEITKAPLSASMIKRYDEHHQDLTLLKALVRQQLPEKYKEIFFDQSKNGYAGYIDGGASQEEFYKFIKPILEKMDGTEELLVKLNREDLLRKQRTFDNGSIPHQIHLGELHAILRRQEDFYPFLKDNREKIEKILTFRIPYYVGPLARGNSRFAWMTRKSEETITPWNFEEVVDKGASAQSFIERMTNFDKNLPNEKVLPKHSLLYEYFTVYNELTKVKYVTEGMRKPAFLSGEQKKAIVDLLFKTNRKVTVKQLKEDYFKKIECFDSVEISGVEDRFNASLGTYHDLLKIIKDKDFLDNEENEDILEDIVLTLTLFEDREMIEERLKTYAHLFDDKVMKQLKRRRYTGWGRLSRKLINGIRDKQSGKTILDFLKSDGFANRNFMQLIHDDSLTFKEDIQKAQVSGQGDSLHEHIANLAGSPAIKKGILQTVKVVDELVKVMGRHKPENIVIEMARENQTTQKGQKNSRERMKRIEEGIKELGSQILKEHPVENTQLQNEKLYLYYLQNGRDMYVDQELDINRLSDYDVDAIVPQSFLKDDSIDNKVLTRSDKNRGKSDNVPSEEVVKKMKNYWRQLLNAKLITQRKFDNLTKAERGGLSELDKAGFIKRQLVETRQITKHVAQILDSRMNTKYDENDKLIREVKVITLKSKLVSDFRKDFQFYKVREINNYHHAHDAYLNAVVGTALIKKYPKLESEFVYGDYKVYDVRKMIAKSEQEIGKATAKYFFYSNIMNFFKTEITLANGEIRKRPLIETNGETGEIVWDKGRDFATVRKVLSMPQVNIVKKTEVQTGGFSKESILPKRNSDKLIARKKDWDPKKYGGFDSPTVAYSVLVVAKVEKGKSKKLKSVKELLGITIMERSSFEKNPIDFLEAKGYKEVKKDLIIKLPKYSLFELENGRKRMLASAGELQKGNELALPSKYVNFLYLASHYEKLKGSPEDNEQKQLFVEQHKHYLDEIIEQISEFSKRVILADANLDKVLSAYNKHRDKPIREQAENIIHLFTLTNLGAPAAFKYFDTTIDRKRYTSTKEVLDATLIHQSITGLYETRIDLSQLGGDPKKKRKVGGPSSGAPPPSGGSPAGSPTSTEEGTSESATPESGPGTSTEPSEGSAPGSPAGSPTSTEEGTSTEPSEGSAPGTSTEPSETGMNNSQGRVTFEDVTVNFTQGEWQRLNPEQRNLYRDVMLENYSNLVSVGQGETTKPDVILRLEQGKEPWLEEEEVLGSGRAEKNGDIGGQIWKPKDVKESL

SEQ ID NO: 1023 - protein, 1611 aa, synthetic construct
  REGION 1..1611: note = Description of Artificial Sequence: Synthetic polypeptide
MGTPKKKRKVMDKKYSIGLAIGTNSVGWAVITDEYKVPSKKFKVLGNTDRHSIKKNLIGALLFDSGETAEATRLKRTARRRYTRRKNRICYLQEIFSNEMAKVDDSFFHRLEESFLVEEDKKHERHPIFGNIVDEVAYHEKYPTIYHLRKKLVDSTDKADLRLIYLALAHMIKFRGHFLIEGDLNPDNSDVDKLFIQLVQTYNQLFEENPINASGVDAKAILSARLSKSRRLENLIAQLPGEKKNGLFGNLIALSLGLTPNFKSNFDLAEDAKLQLSKDTYDDDLDNLLAQIGDQYADLFLAAKNLSDAILLSDILRVNTEITKAPLSASMIKRYDEHHQDLTLLKALVRQQLPEKYKEIFFDQSKNGYAGYIDGGASQEEFYKFIKPILEKMDGTEELLVKLNREDLLRKQRTFDNGSIPHQIHLGELHAILRRQEDFYPFLKDNREKIEKILTFRIPYYVGPLARGNSRFAWMTRKSEETITPWNFEEVVDKGASAQSFIERMTNFDKNLPNEKVLPKHSLLYEYFTVYNELTKVKYVTEGMRKPAFLSGEQKKAIVDLLFKTNRKVTVKQLKEDYFKKIECFDSVEISGVEDRFNASLGTYHDLLKIIKDKDFLDNEENEDILEDIVLTLTLFEDREMIEERLKTYAHLFDDKVMKQLKRRRYTGWGRLSRKLINGIRDKQSGKTILDFLKSDGFANRNFMQLIHDDSLTFKEDIQKAQVSGQGDSLHEHIANLAGSPAIKKGILQTVKVVDELVKVMGRHKPENIVIEMARENQTTQKGQKNSRERMKRIEEGIKELGSQILKEHPVENTQLQNEKLYLYYLQNGRDMYVDQELDINRLSDYDVDAIVPQSFLKDDSIDNKVLTRSDKNRGKSDNVPSEEVVKKMKNYWRQLLNAKLITQRKFDNLTKAERGGLSELDKAGFIKRQLVETRQITKHVAQILDSRMNTKYDENDKLIREVKVITLKSKLVSDFRKDFQFYKVREINNYHHAHDAYLNAVVGTALIKKYPKLESEFVYGDYKVYDVRKMIAKSEQEIGKATAKYFFYSNIMNFFKTEITLANGEIRKRPLIETNGETGEIVWDKGRDFATVRKVLSMPQVNIVKKTEVQTGGFSKESILPKRNSDKLIARKKDWDPKKYGGFDSPTVAYSVLVVAKVEKGKSKKLKSVKELLGITIMERSSFEKNPIDFLEAKGYKEVKKDLIIKLPKYSLFELENGRKRMLASAGELQKGNELALPSKYVNFLYLASHYEKLKGSPEDNEQKQLFVEQHKHYLDEIIEQISEFSKRVILADANLDKVLSAYNKHRDKPIREQAENIIHLFTLTNLGAPAAFKYFDTTIDRKRYTSTKEVLDATLIHQSITGLYETRIDLSQLGGDPKKKRKVGGPSSGAPPPSGGSPAGSPTSTEEGTSESATPESGPGTSTEPSEGSAPGSPAGSPTSTEEGTSTEPSEGSAPGTSTEPSETGMFSQEERMAAGYLPRWSQELVTFEDVSMDFSQEEWELLEPAQKNLYREVMLENYRNVVSLEALKNQCTDVGIKEGPLSPAQTSQVTSLSSWTGYLLFQPVASSHLEQREALWIEEKGTPQASCSDWMTVLRNQDSTYKKVALQE

SEQ ID NO: 1024 - protein, 1572 aa, synthetic construct
  REGION 1..1572: note = Description of Artificial Sequence: Synthetic polypeptide
MGTPKKKRKVMDKKYSIGLAIGTNSVGWAVITDEYKVPSKKFKVLGNTDRHSIKKNLIGALLFDSGETAEATRLKRTARRRYTRRKNRICYLQEIFSNEMAKVDDSFFHRLEESFLVEEDKKHERHPIFGNIVDEVAYHEKYPTIYHLRKKLVDSTDKADLRLIYLALAHMIKFRGHFLIEGDLNPDNSDVDKLFIQLVQTYNQLFEENPINASGVDAKAILSARLSKSRRLENLIAQLPGEKKNGLFGNLIALSLGLTPNFKSNFDLAEDAKLQLSKDTYDDDLDNLLAQIGDQYADLFLAAKNLSDAILLSDILRVNTEITKAPLSASMIKRYDEHHQDLTLLKALVRQQLPEKYKEIFFDQSKNGYAGYIDGGASQEEFYKFIKPILEKMDGTEELLVKLNREDLLRKQRTFDNGSIPHQIHLGELHAILRRQEDFYPFLKDNREKIEKILTFRIPYYVGPLARGNSRFAWMTRKSEETITPWNFEEVVDKGASAQSFIERMTNFDKNLPNEKVLPKHSLLYEYFTVYNELTKVKYVTEGMRKPAFLSGEQKKAIVDLLFKTNRKVTVKQLKEDYFKKIECFDSVEISGVEDRFNASLGTYHDLLKIIKDKDFLDNEENEDILEDIVLTLTLFEDREMIEERLKTYAHLFDDKVMKQLKRRRYTGWGRLSRKLINGIRDKQSGKTILDFLKSDGFANRNFMQLIHDDSLTFKEDIQKAQVSGQGDSLHEHIANLAGSPAIKKGILQTVKVVDELVKVMGRHKPENIVIEMARENQTTQKGQKNSRERMKRIEEGIKELGSQILKEHPVENTQLQNEKLYLYYLQNGRDMYVDQELDINRLSDYDVDAIVPQSFLKDDSIDNKVLTRSDKNRGKSDNVPSEEVVKKMKNYWRQLLNAKLITQRKFDNLTKAERGGLSELDKAGFIKRQLVETRQITKHVAQILDSRMNTKYDENDKLIREVKVITLKSKLVSDFRKDFQFYKVREINNYHHAHDAYLNAVVGTALIKKYPKLESEFVYGDYKVYDVRKMIAKSEQEIGKATAKYFFYSNIMNFFKTEITLANGEIRKRPLIETNGETGEIVWDKGRDFATVRKVLSMPQVNIVKKTEVQTGGFSKESILPKRNSDKLIARKKDWDPKKYGGFDSPTVAYSVLVVAKVEKGKSKKLKSVKELLGITIMERSSFEKNPIDFLEAKGYKEVKKDLIIKLPKYSLFELENGRKRMLASAGELQKGNELALPSKYVNFLYLASHYEKLKGSPEDNEQKQLFVEQHKHYLDEIIEQISEFSKRVILADANLDKVLSAYNKHRDKPIREQAENIIHLFTLTNLGAPAAFKYFDTTIDRKRYTSTKEVLDATLIHQSITGLYETRIDLSQLGGDPKKKRKVGGPSSGAPPPSGGSPAGSPTSTEEGTSESATPESGPGTSTEPSEGSAPGSPAGSPTSTEEGTSTEPSEGSAPGTSTEPSETGMAAAVLTDRAQVSVTFDDVAVTFTKEEWGQLDLAQRTLYQEVMLENCGLLVSLGCPVPKAELICHLEHGQEPWTRKEDLSQDTCPGDKGKPKTTEPTTCEPALSE

SEQ ID NO: 1025 - protein, 1572 aa, synthetic construct
  REGION 1..1572: note = Description of Artificial Sequence: Synthetic polypeptide
MGTPKKKRKVMDKKYSIGLAIGTNSVGWAVITDEYKVPSKKFKVLGNTDRHSIKKNLIGALLFDSGETAEATRLKRTARRRYTRRKNRICYLQEIFSNEMAKVDDSFFHRLEESFLVEEDKKHERHPIFGNIVDEVAYHEKYPTIYHLRKKLVDSTDKADLRLIYLALAHMIKFRGHFLIEGDLNPDNSDVDKLFIQLVQTYNQLFEENPINASGVDAKAILSARLSKSRRLENLIAQLPGEKKNGLFGNLIALSLGLTPNFKSNFDLAEDAKLQLSKDTYDDDLDNLLAQIGDQYADLFLAAKNLSDAILLSDILRVNTEITKAPLSASMIKRYDEHHQDLTLLKALVRQQLPEKYKEIFFDQSKNGYAGYIDGGASQEEFYKFIKPILEKMDGTEELLVKLNREDLLRKQRTFDNGSIPHQIHLGELHAILRRQEDFYPFLKDNREKIEKILTFRIPYYVGPLARGNSRFAWMTRKSEETITPWNFEEVVDKGASAQSFIERMTNFDKNLPNEKVLPKHSLLYEYFTVYNELTKVKYVTEGMRKPAFLSGEQKKAIVDLLFKTNRKVTVKQLKEDYFKKIECFDSVEISGVEDRFNASLGTYHDLLKIIKDKDFLDNEENEDILEDIVLTLTLFEDREMIEERLKTYAHLFDDKVMKQLKRRRYTGWGRLSRKLINGIRDKQSGKTILDFLKSDGFANRNFMQLIHDDSLTFKEDIQKAQVSGQGDSLHEHIANLAGSPAIKKGILQTVKVVDELVKVMGRHKPENIVIEMARENQTTQKGQKNSRERMKRIEEGIKELGSQILKEHPVENTQLQNEKLYLYYLQNGRDMYVDQELDINRLSDYDVDAIVPQSFLKDDSIDNKVLTRSDKNRGKSDNVPSEEVVKKMKNYWRQLLNAKLITQRKFDNLTKAERGGLSELDKAGFIKRQLVETRQITKHVAQILDSRMNTKYDENDKLIREVKVITLKSKLVSDFRKDFQFYKVREINNYHHAHDAYLNAVVGTALIKKYPKLESEFVYGDYKVYDVRKMIAKSEQEIGKATAKYFFYSNIMNFFKTEITLANGEIRKRPLIETNGETGEIVWDKGRDFATVRKVLSMPQVNIVKKTEVQTGGFSKESILPKRNSDKLIARKKDWDPKKYGGFDSPTVAYSVLVVAKVEKGKSKKLKSVKELLGITIMERSSFEKNPIDFLEAKGYKEVKKDLIIKLPKYSLFELENGRKRMLASAGELQKGNELALPSKYVNFLYLASHYEKLKGSPEDNEQKQLFVEQHKHYLDEIIEQISEFSKRVILADANLDKVLSAYNKHRDKPIREQAENIIHLFTLTNLGAPAAFKYFDTTIDRKRYTSTKEVLDATLIHQSITGLYETRIDLSQLGGDPKKKRKVGGPSSGAPPPSGGSPAGSPTSTEEGTSESATPESGPGTSTEPSEGSAPGSPAGSPTSTEEGTSTEPSEGSAPGTSTEPSETGMAAGQREARPQVSLTFEDVAVLFTRDEWRKLAPSQRNLYRDVMLENYRNLVSLGLPFTKPKVISLLQQGEDPWEVEKDGSGVSSLGSKSSHKTTKSTQTQDSSFQ

SEQ ID NO: 1026 - protein, 1559 aa, synthetic construct
  REGION 1..1559: note = Description of Artificial Sequence: Synthetic polypeptide
MGTPKKKRKVMDKKYSIGLAIGTNSVGWAVITDEYKVPSKKFKVLGNTDRHSIKKNLIGALLFDSGETAEATRLKRTARRRYTRRKNRICYLQEIFSNEMAKVDDSFFHRLEESFLVEEDKKHERHPIFGNIVDEVAYHEKYPTIYHLRKKLVDSTDKADLRLIYLALAHMIKFRGHFLIEGDLNPDNSDVDKLFIQLVQTYNQLFEENPINASGVDAKAILSARLSKSRRLENLIAQLPGEKKNGLFGNLIALSLGLTPNFKSNFDLAEDAKLQLSKDTYDDDLDNLLAQIGDQYADLFLAAKNLSDAILLSDILRVNTEITKAPLSASMIKRYDEHHQDLTLLKALVRQQLPEKYKEIFFDQSKNGYAGYIDGGASQEEFYKFIKPILEKMDGTEELLVKLNREDLLRKQRTFDNGSIPHQIHLGELHAILRRQEDFYPFLKDNREKIEKILTFRIPYYVGPLARGNSRFAWMTRKSEETITPWNFEEVVDKGASAQSFIERMTNFDKNLPNEKVLPKHSLLYEYFTVYNELTKVKYVTEGMRKPAFLSGEQKKAIVDLLFKTNRKVTVKQLKEDYFKKIECFDSVEISGVEDRFNASLGTYHDLLKIIKDKDFLDNEENEDILEDIVLTLTLFEDREMIEERLKTYAHLFDDKVMKQLKRRRYTGWGRLSRKLINGIRDKQSGKTILDFLKSDGFANRNFMQLIHDDSLTFKEDIQKAQVSGQGDSLHEHIANLAGSPAIKKGILQTVKVVDELVKVMGRHKPENIVIEMARENQTTQKGQKNSRERMKRIEEGIKELGSQILKEHPVENTQLQNEKLYLYYLQNGRDMYVDQELDINRLSDYDVDAIVPQSFLKDDSIDNKVLTRSDKNRGKSDNVPSEEVVKKMKNYWRQLLNAKLITQRKFDNLTKAERGGLSELDKAGFIKRQLVETRQITKHVAQILDSRMNTKYDENDKLIREVKVITLKSKLVSDFRKDFQFYKVREINNYHHAHDAYLNAVVGTALIKKYPKLESEFVYGDYKVYDVRKMIAKSEQEIGKATAKYFFYSNIMNFFKTEITLANGEIRKRPLIETNGETGEIVWDKGRDFATVRKVLSMPQVNIVKKTEVQTGGFSKESILPKRNSDKLIARKKDWDPKKYGGFDSPTVAYSVLVVAKVEKGKSKKLKSVKELLGITIMERSSFEKNPIDFLEAKGYKEVKKDLIIKLPKYSLFELENGRKRMLASAGELQKGNELALPSKYVNFLYLASHYEKLKGSPEDNEQKQLFVEQHKHYLDEIIEQISEFSKRVILADANLDKVLSAYNKHRDKPIREQAENIIHLFTLTNLGAPAAFKYFDTTIDRKRYTSTKEVLDATLIHQSITGLYETRIDLSQLGGDPKKKRKVGGPSSGAPPPSGGSPAGSPTSTEEGTSESATPESGPGTSTEPSEGSAPGSPAGSPTSTEEGTSTEPSEGSAPGTSTEPSETGMAFEDVAVYFSQEEWGLLDTAQRALYRRVMLDNFALVASLGLSTSRPRVVIQLERGEEPWVPSGTDTTLSRTTYRRRNPGSWSLTEDRDVSG

SEQ ID NO: 1027 - protein, 1547 aa, synthetic construct
  REGION 1..1547: note = Description of Artificial Sequence: Synthetic polypeptide
MGTPKKKRKVMDKKYSIGLAIGTNSVGWAVITDEYKVPSKKFKVLGNTDRHSIKKNLIGALLFDSGETAEATRLKRTARRRYTRRKNRICYLQEIFSNEMAKVDDSFFHRLEESFLVEEDKKHERHPIFGNIVDEVAYHEKYPTIYHLRKKLVDSTDKADLRLIYLALAHMIKFRGHFLIEGDLNPDNSDVDKLFIQLVQTYNQLFEENPINASGVDAKAILSARLSKSRRLENLIAQLPGEKKNGLFGNLIALSLGLTPNFKSNFDLAEDAKLQLSKDTYDDDLDNLLAQIGDQYADLFLAAKNLSDAILLSDILRVNTEITKAPLSASMIKRYDEHHQDLTLLKALVRQQLPEKYKEIFFDQSKNGYAGYIDGGASQEEFYKFIKPILEKMDGTEELLVKLNREDLLRKQRTFDNGSIPHQIHLGELHAILRRQEDFYPFLKDNREKIEKILTFRIPYYVGPLARGNSRFAWMTRKSEETITPWNFEEVVDKGASAQSFIERMTNFDKNLPNEKVLPKHSLLYEYFTVYNELTKVKYVTEGMRKPAFLSGEQKKAIVDLLFKTNRKVTVKQLKEDYFKKIECFDSVEISGVEDRFNASLGTYHDLLKIIKDKDFLDNEENEDILEDIVLTLTLFEDREMIEERLKTYAHLFDDKVMKQLKRRRYTGWGRLSRKLINGIRDKQSGKTILDFLKSDGFANRNFMQLIHDDSLTFKEDIQKAQVSGQGDSLHEHIANLAGSPAIKKGILQTVKVVDELVKVMGRHKPENIVIEMARENQTTQKGQKNSRERMKRIEEGIKELGSQILKEHPVENTQLQNEKLYLYYLQNGRDMYVDQELDINRLSDYDVDAIVPQSFLKDDSIDNKVLTRSDKNRGKSDNVPSEEVVKKMKNYWRQLLNAKLITQRKFDNLTKAERGGLSELDKAGFIKRQLVETRQITKHVAQILDSRMNTKYDENDKLIREVKVITLKSKLVSDFRKDFQFYKVREINNYHHAHDAYLNAVVGTALIKKYPKLESEFVYGDYKVYDVRKMIAKSEQEIGKATAKYFFYSNIMNFFKTEITLANGEIRKRPLIETNGETGEIVWDKGRDFATVRKVLSMPQVNIVKKTEVQTGGFSKESILPKRNSDKLIARKKDWDPKKYGGFDSPTVAYSVLVVAKVEKGKSKKLKSVKELLGITIMERSSFEKNPIDFLEAKGYKEVKKDLIIKLPKYSLFELENGRKRMLASAGELQKGNELALPSKYVNFLYLASHYEKLKGSPEDNEQKQLFVEQHKHYLDEIIEQISEFSKRVILADANLDKVLSAYNKHRDKPIREQAENIIHLFTLTNLGAPAAFKYFDTTIDRKRYTSTKEVLDATLIHQSITGLYETRIDLSQLGGDPKKKRKVGGPSSGAPPPSGGSPAGSPTSTEEGTSESATPESGPGTSTEPSEGSAPGSPAGSPTSTEEGTSTEPSEGSAPGTSTEPSETGNKKLEAVGTGIEPKAMSQGLVTFGDVAVDFSQEEWEWLNPIQRNLYRKVMLENYRNLASLGLCVSKPDVISSLEQGKEPW

SEQ ID NO: 1028 - protein, 1547 aa, synthetic construct
  REGION 1..1547: note = Description of Artificial Sequence: Synthetic polypeptide
MGTPKKKRKVMDKKYSIGLAIGTNSVGWAVITDEYKVPSKKFKVLGNTDRHSIKKNLIGALLFDSGETAEATRLKRTARRRYTRRKNRICYLQEIFSNEMAKVDDSFFHRLEESFLVEEDKKHERHPIFGNIVDEVAYHEKYPTIYHLRKKLVDSTDKADLRLIYLALAHMIKFRGHFLIEGDLNPDNSDVDKLFIQLVQTYNQLFEENPINASGVDAKAILSARLSKSRRLENLIAQLPGEKKNGLFGNLIALSLGLTPNFKSNFDLAEDAKLQLSKDTYDDDLDNLLAQIGDQYADLFLAAKNLSDAILLSDILRVNTEITKAPLSASMIKRYDEHHQDLTLLKALVRQQLPEKYKEIFFDQSKNGYAGYIDGGASQEEFYKFIKPILEKMDGTEELLVKLNREDLLRKQRTFDNGSIPHQIHLGELHAILRRQEDFYPFLKDNREKIEKILTFRIPYYVGPLARGNSRFAWMTRKSEETITPWNFEEVVDKGASAQSFIERMTNFDKNLPNEKVLPKHSLLYEYFTVYNELTKVKYVTEGMRKPAFLSGEQKKAIVDLLFKTNRKVTVKQLKEDYFKKIECFDSVEISGVEDRFNASLGTYHDLLKIIKDKDFLDNEENEDILEDIVLTLTLFEDREMIEERLKTYAHLFDDKVMKQLKRRRYTGWGRLSRKLINGIRDKQSGKTILDFLKSDGFANRNFMQLIHDDSLTFKEDIQKAQVSGQGDSLHEHIANLAGSPAIKKGILQTVKVVDELVKVMGRHKPENIVIEMARENQTTQKGQKNSRERMKRIEEGIKELGSQILKEHPVENTQLQNEKLYLYYLQNGRDMYVDQELDINRLSDYDVDAIVPQSFLKDDSIDNKVLTRSDKNRGKSDNVPSEEVVKKMKNYWRQLLNAKLITQRKFDNLTKAERGGLSELDKAGFIKRQLVETRQITKHVAQILDSRMNTKYDENDKLIREVKVITLKSKLVSDFRKDFQFYKVREINNYHHAHDAYLNAVVGTALIKKYPKLESEFVYGDYKVYDVRKMIAKSEQEIGKATAKYFFYSNIMNFFKTEITLANGEIRKRPLIETNGETGEIVWDKGRDFATVRKVLSMPQVNIVKKTEVQTGGFSKESILPKRNSDKLIARKKDWDPKKYGGFDSPTVAYSVLVVAKVEKGKSKKLKSVKELLGITIMERSSFEKNPIDFLEAKGYKEVKKDLIIKLPKYSLFELENGRKRMLASAGELQKGNELALPSKYVNFLYLASHYEKLKGSPEDNEQKQLFVEQHKHYLDEIIEQISEFSKRVILADANLDKVLSAYNKHRDKPIREQAENIIHLFTLTNLGAPAAFKYFDTTIDRKRYTSTKEVLDATLIHQSITGLYETRIDLSQLGGDPKKKRKVGGPSSGAPPPSGGSPAGSPTSTEEGTSESATPESGPGTSTEPSEGSAPGSPAGSPTSTEEGTSTEPSEGSAPGTSTEPSETGDSVAFEDVAVNFTLEEWALLDPSQKNLYRDVMRETFRNLASVGKQWEDQNIEDPFKIPRRNISHIPERLCESKEGGQGEE

SEQ ID NO: 1029 - protein, 1547 aa, synthetic construct
  REGION 1..1547: note = Description of Artificial Sequence: Synthetic polypeptide
MGTPKKKRKVMDKKYSIGLAIGTNSVGWAVITDEYKVPSKKFKVLGNTDRHSIKKNLIGALLFDSGETAEATRLKRTARRRYTRRKNRICYLQEIFSNEMAKVDDSFFHRLEESFLVEEDKKHERHPIFGNIVDEVAYHEKYPTIYHLRKKLVDSTDKADLRLIYLALAHMIKFRGHFLIEGDLNPDNSDVDKLFIQLVQTYNQLFEENPINASGVDAKAILSARLSKSRRLENLIAQLPGEKKNGLFGNLIALSLGLTPNFKSNFDLAEDAKLQLSKDTYDDDLDNLLAQIGDQYADLFLAAKNLSDAILLSDILRVNTEITKAPLSASMIKRYDEHHQDLTLLKALVRQQLPEKYKEIFFDQSKNGYAGYIDGGASQEEFYKFIKPILEKMDGTEELLVKLNREDLLRKQRTFDNGSIPHQIHLGELHAILRRQEDFYPFLKDNREKIEKILTFRIPYYVGPLARGNSRFAWMTRKSEETITPWNFEEVVDKGASAQSFIERMTNFDKNLPNEKVLPKHSLLYEYFTVYNELTKVKYVTEGMRKPAFLSGEQKKAIVDLLFKTNRKVTVKQLKEDYFKKIECFDSVEISGVEDRFNASLGTYHDLLKIIKDKDFLDNEENEDILEDIVLTLTLFEDREMIEERLKTYAHLFDDKVMKQLKRRRYTGWGRLSRKLINGIRDKQSGKTILDFLKSDGFANRNFMQLIHDDSLTFKEDIQKAQVSGQGDSLHEHIANLAGSPAIKKGILQTVKVVDELVKVMGRHKPENIVIEMARENQTTQKGQKNSRERMKRIEEGIKELGSQILKEHPVENTQLQNEKLYLYYLQNGRDMYVDQELDINRLSDYDVDAIVPQSFLKDDSIDNKVLTRSDKNRGKSDNVPSEEVVKKMKNYWRQLLNAKLITQRKFDNLTKAERGGLSELDKAGFIKRQLVETRQITKHVAQILDSRMNTKYDENDKLIREVKVITLKSKLVSDFRKDFQFYKVREINNYHHAHDAYLNAVVGTALIKKYPKLESEFVYGDYKVYDVRKMIAKSEQEIGKATAKYFFYSNIMNFFKTEITLANGEIRKRPLIETNGETGEIVWDKGRDFATVRKVLSMPQVNIVKKTEVQTGGFSKESILPKRNSDKLIARKKDWDPKKYGGFDSPTVAYSVLVVAKVEKGKSKKLKSVKELLGITIMERSSFEKNPIDFLEAKGYKEVKKDLIIKLPKYSLFELENGRKRMLASAGELQKGNELALPSKYVNFLYLASHYEKLKGSPEDNEQKQLFVEQHKHYLDEIIEQISEFSKRVILADANLDKVLSAYNKHRDKPIREQAENIIHLFTLTNLGAPAAFKYFDTTIDRKRYTSTKEVLDATLIHQSITGLYETRIDLSQLGGDPKKKRKVGGPSSGAPPPSGGSPAGSPTSTEEGTSESATPESGPGTSTEPSEGSAPGSPAGSPTSTEEGTSTEPSEGSAPGTSTEPSETGIEYQIPVSFKDVVVGFTQEEWHRLSPAQRALYRDVMLETYSNLVSVGYEGTKPDVILRLEQEEAPWIGEAACPGCHCWED

SEQ ID NO: 1030 - protein, 1547 aa, synthetic construct
  REGION 1..1547: note = Description of Artificial Sequence: Synthetic polypeptide
MGTPKKKRKVMDKKYSIGLAIGTNSVGWAVITDEYKVPSKKFKVLGNTDRHSIKKNLIGALLFDSGETAEATRLKRTARRRYTRRKNRICYLQEIFSNEMAKVDDSFFHRLEESFLVEEDKKHERHPIFGNIVDEVAYHEKYPTIYHLRKKLVDSTDKADLRLIYLALAHMIKFRGHFLIEGDLNPDNSDVDKLFIQLVQTYNQLFEENPINASGVDAKAILSARLSKSRRLENLIAQLPGEKKNGLFGNLIALSLGLTPNFKSNFDLAEDAKLQLSKDTYDDDLDNLLAQIGDQYADLFLAAKNLSDAILLSDILRVNTEITKAPLSASMIKRYDEHHQDLTLLKALVRQQLPEKYKEIFFDQSKNGYAGYIDGGASQEEFYKFIKPILEKMDGTEELLVKLNREDLLRKQRTFDNGSIPHQIHLGELHAILRRQEDFYPFLKDNREKIEKILTFRIPYYVGPLARGNSRFAWMTRKSEETITPWNFEEVVDKGASAQSFIERMTNFDKNLPNEKVLPKHSLLYEYFTVYNELTKVKYVTEGMRKPAFLSGEQKKAIVDLLFKTNRKVTVKQLKEDYFKKIECFDSVEISGVEDRFNASLGTYHDLLKIIKDKDFLDNEENEDILEDIVLTLTLFEDREMIEERLKTYAHLFDDKVMKQLKRRRYTGWGRLSRKLINGIRDKQSGKTILDFLKSDGFANRNFMQLIHDDSLTFKEDIQKAQVSGQGDSLHEHIANLAGSPAIKKGILQTVKVVDELVKVMGRHKPENIVIEMARENQTTQKGQKNSRERMKRIEEGIKELGSQILKEHPVENTQLQNEKLYLYYLQNGRDMYVDQELDINRLSDYDVDAIVPQSFLKDDSIDNKVLTRSDKNRGKSDNVPSEEVVKKMKNYWRQLLNAKLITQRKFDNLTKAERGGLSELDKAGFIKRQLVETRQITKHVAQILDSRMNTKYDENDKLIREVKVITLKSKLVSDFRKDFQFYKVREINNYHHAHDAYLNAVVGTALIKKYPKLESEFVYGDYKVYDVRKMIAKSEQEIGKATAKYFFYSNIMNFFKTEITLANGEIRKRPLIETNGETGEIVWDKGRDFATVRKVLSMPQVNIVKKTEVQTGGFSKESILPKRNSDKLIARKKDWDPKKYGGFDSPTVAYSVLVVAKVEKGKSKKLKSVKELLGITIMERSSFEKNPIDFLEAKGYKEVKKDLIIKLPKYSLFELENGRKRMLASAGELQKGNELALPSKYVNFLYLASHYEKLKGSPEDNEQKQLFVEQHKHYLDEIIEQISEFSKRVILADANLDKVLSAYNKHRDKPIREQAENIIHLFTLTNLGAPAAFKYFDTTIDRKRYTSTKEVLDATLIHQSITGLYETRIDLSQLGGDPKKKRKVGGPSSGAPPPSGGSPAGSPTSTEEGTSESATPESGPGTSTEPSEGSAPGSPAGSPTSTEEGTSTEPSEGSAPGTSTEPSETGGVLTFRDVAVEFSPEEWECLDSAQQRLYRDVMLENYGNLVSLGLAIFKPDLMTCLEQRKEPWKVKRQEAVAKHPAGSFHF

SEQ ID NO: 1031 - protein, 1547 aa, synthetic construct
  REGION 1..1547: note = Description of Artificial Sequence: Synthetic polypeptide
MGTPKKKRKVMDKKYSIGLAIGTNSVGWAVITDEYKVPSKKFKVLGNTDRHSIKKNLIGALLFDSGETAEATRLKRTARRRYTRRKNRICYLQEIFSNEMAKVDDSFFHRLEESFLVEEDKKHERHPIFGNIVDEVAYHEKYPTIYHLRKKLVDSTDKADLRLIYLALAHMIKFRGHFLIEGDLNPDNSDVDKLFIQLVQTYNQLFEENPINASGVDAKAILSARLSKSRRLENLIAQLPGEKKNGLFGNLIALSLGLTPNFKSNFDLAEDAKLQLSKDTYDDDLDNLLAQIGDQYADLFLAAKNLSDAILLSDILRVNTEITKAPLSASMIKRYDEHHQDLTLLKALVRQQLPEKYKEIFFDQSKNGYAGYIDGGASQEEFYKFIKPILEKMDGTEELLVKLNREDLLRKQRTFDNGSIPHQIHLGELHAILRRQEDFYPFLKDNREKIEKILTFRIPYYVGPLARGNSRFAWMTRKSEETITPWNFEEVVDKGASAQSFIERMTNFDKNLPNEKVLPKHSLLYEYFTVYNELTKVKYVTEGMRKPAFLSGEQKKAIVDLLFKTNRKVTVKQLKEDYFKKIECFDSVEISGVEDRFNASLGTYHDLLKIIKDKDFLDNEENEDILEDIVLTLTLFEDREMIEERLKTYAHLFDDKVMKQLKRRRYTGWGRLSRKLINGIRDKQSGKTILDFLKSDGFANRNFMQLIHDDSLTFKEDIQKAQVSGQGDSLHEHIANLAGSPAIKKGILQTVKVVDELVKVMGRHKPENIVIEMARENQTTQKGQKNSRERMKRIEEGIKELGSQILKEHPVENTQLQNEKLYLYYLQNGRDMYVDQELDINRLSDYDVDAIVPQSFLKDDSIDNKVLTRSDKNRGKSDNVPSEEVVKKMKNYWRQLLNAKLITQRKFDNLTKAERGGLSELDKAGFIKRQLVETRQITKHVAQILDSRMNTKYDENDKLIREVKVITLKSKLVSDFRKDFQFYKVREINNYHHAHDAYLNAVVGTALIKKYPKLESEFVYGDYKVYDVRKMIAKSEQEIGKATAKYFFYSNIMNFFKTEITLANGEIRKRPLIETNGETGEIVWDKGRDFATVRKVLSMPQVNIVKKTEVQTGGFSKESILPKRNSDKLIARKKDWDPKKYGGFDSPTVAYSVLVVAKVEKGKSKKLKSVKELLGITIMERSSFEKNPIDFLEAKGYKEVKKDLIIKLPKYSLFELENGRKRMLASAGELQKGNELALPSKYVNFLYLASHYEKLKGSPEDNEQKQLFVEQHKHYLDEIIEQISEFSKRVILADANLDKVLSAYNKHRDKPIREQAENIIHLFTLTNLGAPAAFKYFDTTIDRKRYTSTKEVLDATLIHQSITGLYETRIDLSQLGGDPKKKRKVGGPSSGAPPPSGGSPAGSPTSTEEGTSESATPESGPGTSTEPSEGSAPGSPAGSPTSTEEGTSTEPSEGSAPGTSTEPSETGNATIVMSVRREQGSSSGEGSLSFEDVAVGFTREEWQFLDQSQKVLYKEVMLENYINLVSIGYRGTKPDSLFKLEQGEPPG

SEQ ID NO: 1032 - protein, 1547 aa, synthetic construct
  REGION 1..1547: note = Description of Artificial Sequence: Synthetic polypeptide
MGTPKKKRKVMDKKYSIGLAIGTNSVGWAVITDEYKVPSKKFKVLGNTDRHSIKKNLIGALLFDSGETAEATRLKRTARRRYTRRKNRICYLQEIFSNEMAKVDDSFFHRLEESFLVEEDKKHERHPIFGNIVDEVAYHEKYPTIYHLRKKLVDSTDKADLRLIYLALAHMIKFRGHFLIEGDLNPDNSDVDKLFIQLVQTYNQLFEENPINASGVDAKAILSARLSKSRRLENLIAQLPGEKKNGLFGNLIALSLGLTPNFKSNFDLAEDAKLQLSKDTYDDDLDNLLAQIGDQYADLFLAAKNLSDAILLSDILRVNTEITKAPLSASMIKRYDEHHQDLTLLKALVRQQLPEKYKEIFFDQSKNGYAGYIDGGASQEEFYKFIKPILEKMDGTEELLVKLNREDLLRKQRTFDNGSIPHQIHLGELHAILRRQEDFYPFLKDNREKIEKILTFRIPYYVGPLARGNSRFAWMTRKSEETITPWNFEEVVDKGASAQSFIERMTNFDKNLPNEKVLPKHSLLYEYFTVYNELTKVKYVTEGMRKPAFLSGEQKKAIVDLLFKTNRKVTVKQLKEDYFKKIECFDSVEISGVEDRFNASLGTYHDLLKIIKDKDFLDNEENEDILEDIVLTLTLFEDREMIEERLKTYAHLFDDKVMKQLKRRRYTGWGRLSRKLINGIRDKQSGKTILDFLKSDGFANRNFMQLIHDDSLTFKEDIQKAQVSGQGDSLHEHIANLAGSPAIKKGILQTVKVVDELVKVMGRHKPENIVIEMARENQTTQKGQKNSRERMKRIEEGIKELGSQILKEHPVENTQLQNEKLYLYYLQNGRDMYVDQELDINRLSDYDVDAIVPQSFLKDDSIDNKVLTRSDKNRGKSDNVPSEEVVKKMKNYWRQLLNAKLITQRKFDNLTKAERGGLSELDKAGFIKRQLVETRQITKHVAQILDSRMNTKYDENDKLIREVKVITLKSKLVSDFRKDFQFYKVREINNYHHAHDAYLNAVVGTALIKKYPKLESEFVYGDYKVYDVRKMIAKSEQEIGKATAKYFFYSNIMNFFKTEITLANGEIRKRPLIETNGETGEIVWDKGRDFATVRKVLSMPQVNIVKKTEVQTGGFSKESILPKRNSDKLIARKKDWDPKKYGGFDSPTVAYSVLVVAKVEKGKSKKLKSVKELLGITIMERSSFEKNPIDFLEAKGYKEVKKDLIIKLPKYSLFELENGRKRMLASAGELQKGNELALPSKYVNFLYLASHYEKLKGSPEDNEQKQLFVEQHKHYLDEIIEQISEFSKRVILADANLDKVLSAYNKHRDKPIREQAENIIHLFTLTNLGAPAAFKYFDTTIDRKRYTSTKEVLDATLIHQSITGLYETRIDLSQLGGDPKKKRKVGGPSSGAPPPSGGSPAGSPTSTEEGTSESATPESGPGTSTEPSEGSAPGSPAGSPTSTEEGTSTEPSEGSAPGTSTEPSETGEGEYIKLKVIGQDSSEIHFKVKMTTHLKKLKESYCQRQGVPMNSLRFLFEGQRIADNHTPKELGMEEEDVIEVYQEQTGG

SEQ ID NO: 1033 - protein, 1547 aa, synthetic construct
  REGION 1..1547: note = Description of Artificial Sequence: Synthetic polypeptide
MGTPKKKRKVMDKKYSIGLAIGTNSVGWAVITDEYKVPSKKFKVLGNTDRHSIKKNLIGALLFDSGETAEATRLKRTARRRYTRRKNRICYLQEIFSNEMAKVDDSFFHRLEESFLVEEDKKHERHPIFGNIVDEVAYHEKYPTIYHLRKKLVDSTDKADLRLIYLALAHMIKFRGHFLIEGDLNPDNSDVDKLFIQLVQTYNQLFEENPINASGVDAKAILSARLSKSRRLENLIAQLPGEKKNGLFGNLIALSLGLTPNFKSNFDLAEDAKLQLSKDTYDDDLDNLLAQIGDQYADLFLAAKNLSDAILLSDILRVNTEITKAPLSASMIKRYDEHHQDLTLLKALVRQQLPEKYKEIFFDQSKNGYAGYIDGGASQEEFYKFIKPILEKMDGTEELLVKLNREDLLRKQRTFDNGSIPHQIHLGELHAILRRQEDFYPFLKDNREKIEKILTFRIPYYVGPLARGNSRFAWMTRKSEETITPWNFEEVVDKGASAQSFIERMTNFDKNLPNEKVLPKHSLLYEYFTVYNELTKVKYVTEGMRKPAFLSGEQKKAIVDLLFKTNRKVTVKQLKEDYFKKIECFDSVEISGVEDRFNASLGTYHDLLKIIKDKDFLDNEENEDILEDIVLTLTLFEDREMIEERLKTYAHLFDDKVMKQLKRRRYTGWGRLSRKLINGIRDKQSGKTILDFLKSDGFANRNFMQLIHDDSLTFKEDIQKAQVSGQGDSLHEHIANLAGSPAIKKGILQTVKVVDELVKVMGRHKPENIVIEMARENQTTQKGQKNSRERMKRIEEGIKELGSQILKEHPVENTQLQNEKLYLYYLQNGRDMYVDQELDINRLSDYDVDAIVPQSFLKDDSIDNKVLTRSDKNRGKSDNVPSEEVVKKMKNYWRQLLNAKLITQRKFDNLTKAERGGLSELDKAGFIKRQLVETRQITKHVAQILDSRMNTKYDENDKLIREVKVITLKSKLVSDFRKDFQFYKVREINNYHHAHDAYLNAVVGTALIKKYPKLESEFVYGDYKVYDVRKMIAKSEQEIGKATAKYFFYSNIMNFFKTEITLANGEIRKRPLIETNGETGEIVWDKGRDFATVRKVLSMPQVNIVKKTEVQTGGFSKESILPKRNSDKLIARKKDWDPKKYGGFDSPTVAYSVLVVAKVEKGKSKKLKSVKELLGITIMERSSFEKNPIDFLEAKGYKEVKKDLIIKLPKYSLFELENGRKRMLASAGELQKGNELALPSKYVNFLYLASHYEKLKGSPEDNEQKQLFVEQHKHYLDEIIEQISEFSKRVILADANLDKVLSAYNKHRDKPIREQAENIIHLFTLTNLGAPAAFKYFDTTIDRKRYTSTKEVLDATLIHQSITGLYETRIDLSQLGGDPKKKRKVGGPSSGAPPPSGGSPAGSPTSTEEGTSESATPESGPGTSTEPSEGSAPGSPAGSPTSTEEGTSTEPSEGSAPGTSTEPSETGENDHINLKVAGQDGSVVQFKIKRHTPLSKLMKAYCERQGLSMRQIRFRFDGQPINETDTPAQLEMEDEDTIDVFQQQTGG

SEQ ID NO: 1034 - protein, 1547 aa, synthetic construct
  REGION 1..1547: note = Description of Artificial Sequence: Synthetic polypeptide
MGTPKKKRKVMDKKYSIGLAIGTNSVGWAVITDEYKVPSKKFKVLGNTDRHSIKKNLIGALLFDSGETAEATRLKRTARRRYTRRKNRICYLQEIFSNEMAKVDDSFFHRLEESFLVEEDKKHERHPIFGNIVDEVAYHEKYPTIYHLRKKLVDSTDKADLRLIYLALAHMIKFRGHFLIEGDLNPDNSDVDKLFIQLVQTYNQLFEENPINASGVDAKAILSARLSKSRRLENLIAQLPGEKKNGLFGNLIALSLGLTPNFKSNFDLAEDAKLQLSKDTYDDDLDNLLAQIGDQYADLFLAAKNLSDAILLSDILRVNTEITKAPLSASMIKRYDEHHQDLTLLKALVRQQLPEKYKEIFFDQSKNGYAGYIDGGASQEEFYKFIKPILEKMDGTEELLVKLNREDLLRKQRTFDNGSIPHQIHLGELHAILRRQEDFYPFLKDNREKIEKILTFRIPYYVGPLARGNSRFAWMTRKSEETITPWNFEEVVDKGASAQSFIERMTNFDKNLPNEKVLPKHSLLYEYFTVYNELTKVKYVTEGMRKPAFLSGEQKKAIVDLLFKTNRKVTVKQLKEDYFKKIECFDSVEISGVEDRFNASLGTYHDLLKIIKDKDFLDNEENEDILEDIVLTLTLFEDREMIEERLKTYAHLFDDKVMKQLKRRRYTGWGRLSRKLINGIRDKQSGKTILDFLKSDGFANRNFMQLIHDDSLTFKEDIQKAQVSGQGDSLHEHIANLAGSPAIKKGILQTVKVVDELVKVMGRHKPENIVIEMARENQTTQKGQKNSRERMKRIEEGIKELGSQILKEHPVENTQLQNEKLYLYYLQNGRDMYVDQELDINRLSDYDVDAIVPQSFLKDDSIDNKVLTRSDKNRGKSDNVPSEEVVKKMKNYWRQLLNAKLITQRKFDNLTKAERGGLSELDKAGFIKRQLVETRQITKHVAQILDSRMNTKYDENDKLIREVKVITLKSKLVSDFRKDFQFYKVREINNYHHAHDAYLNAVVGTALIKKYPKLESEFVYGDYKVYDVRKMIAKSEQEIGKATAKYFFYSNIMNFFKTEITLANGEIRKRPLIETNGETGEIVWDKGRDFATVRKVLSMPQVNIVKKTEVQTGGFSKESILPKRNSDKLIARKKDWDPKKYGGFDSPTVAYSVLVVAKVEKGKSKKLKSVKELLGITIMERSSFEKNPIDFLEAKGYKEVKKDLIIKLPKYSLFELENGRKRMLASAGELQKGNELALPSKYVNFLYLASHYEKLKGSPEDNEQKQLFVEQHKHYLDEIIEQISEFSKRVILADANLDKVLSAYNKHRDKPIREQAENIIHLFTLTNLGAPAAFKYFDTTIDRKRYTSTKEVLDATLIHQSITGLYETRIDLSQLGGDPKKKRKVGGPSSGAPPPSGGSPAGSPTSTEEGTSESATPESGPGTSTEPSEGSAPGSPAGSPTSTEEGTSTEPSEGSAPGTSTEPSETGAEAFGDSEEDGEDVFEVEKILDMKTEGGKVLYKVRWKGYTSDDDTWEPEIHLEDCKEVLLEFRKKIAENKAKAVRKDIQR

SEQ ID NO: 1035 - protein, 1547 aa, synthetic construct
  REGION 1..1547: note = Description of Artificial Sequence: Synthetic polypeptide
MGTPKKKRKVMDKKYSIGLAIGTNSVGWAVITDEYKVPSKKFKVLGNTDRHSIKKNLIGALLFDSGETAEATRLKRTARRRYTRRKNRICYLQEIFSNEMAKVDDSFFHRLEESFLVEEDKKHERHPIFGNIVDEVAYHEKYPTIYHLRKKLVDSTDKADLRLIYLALAHMIKFRGHFLIEGDLNPDNSDVDKLFIQLVQTYNQLFEENPINASGVDAKAILSARLSKSRRLENLIAQLPGEKKNGLFGNLIALSLGLTPNFKSNFDLAEDAKLQLSKDTYDDDLDNLLAQIGDQYADLFLAAKNLSDAILLSDILRVNTEITKAPLSASMIKRYDEHHQDLTLLKALVRQQLPEKYKEIFFDQSKNGYAGYIDGGASQEEFYKFIKPILEKMDGTEELLVKLNREDLLRKQRTFDNGSIPHQIHLGELHAILRRQEDFYPFLKDNREKIEKILTFRIPYYVGPLARGNSRFAWMTRKSEETITPWNFEEVVDKGASAQSFIERMTNFDKNLPNEKVLPKHSLLYEYFTVYNELTKVKYVTEGMRKPAFLSGEQKKAIVDLLFKTNRKVTVKQLKEDYFKKIECFDSVEISGVEDRFNASLGTYHDLLKIIKDKDFLDNEENEDILEDIVLTLTLFEDREMIEERLKTYAHLFDDKVMKQLKRRRYTGWGRLSRKLINGIRDKQSGKTILDFLKSDGFANRNFMQLIHDDSLTFKEDIQKAQVSGQGDSLHEHIANLAGSPAIKKGILQTVKVVDELVKVMGRHKPENIVIEMARENQTTQKGQKNSRERMKRIEEGIKELGSQILKEHPVENTQLQNEKLYLYYLQNGRDMYVDQELDINRLSDYDVDAIVPQSFLKDDSIDNKVLTRSDKNRGKSDNVPSEEVVKKMKNYWRQLLNAKLITQRKFDNLTKAERGGLSELDKAGFIKRQLVETRQITKHVAQILDSRMNTKYDENDKLIREVKVITLKSKLVSDFRKDFQFYKVREINNYHHAHDAYLNAVVGTALIKKYPKLESEFVYGDYKVYDVRKMIAKSEQEIGKATAKYFFYSNIMNFFKTEITLANGEIRKRPLIETNGETGEIVWDKGRDFATVRKVLSMPQVNIVKKTEVQTGGFSKESILPKRNSDKLIARKKDWDPKKYGGFDSPTVAYSVLVVAKVEKGKSKKLKSVKELLGITIMERSSFEKNPIDFLEAKGYKEVKKDLIIKLPKYSLFELENGRKRMLASAGELQKGNELALPSKYVNFLYLASHYEKLKGSPEDNEQKQLFVEQHKHYLDEIIEQISEFSKRVILADANLDKVLSAYNKHRDKPIREQAENIIHLFTLTNLGAPAAFKYFDTTIDRKRYTSTKEVLDATLIHQSITGLYETRIDLSQLGGDPKKKRKVGGPSSGAPPPSGGSPAGSPTSTEEGTSESATPESGPGTSTEPSEGSAPGSPAGSPTSTEEGTSTEPSEGSAPGTSTEPSETGPSEANSIQSANATTKTSETNHTSRPRLKNVDRSTAQQLAVTVGNVTVIITDFKEKTRSSSTSSSTVTSSAGSEQQNQSSS

SEQ ID NO: 1036 - protein, 1547 aa, synthetic construct
  REGION 1..1547: note = Description of Artificial Sequence: Synthetic polypeptide
MGTPKKKRKVMDKKYSIGLAIGTNSVGWAVITDEYKVPSKKFKVLGNTDRHSIKKNLIGALLFDSGETAEATRLKRTARRRYTRRKNRICYLQEIFSNEMAKVDDSFFHRLEESFLVEEDKKHERHPIFGNIVDEVAYHEKYPTIYHLRKKLVDSTDKADLRLIYLALAHMIKFRGHFLIEGDLNPDNSDVDKLFIQLVQTYNQLFEENPINASGVDAKAILSARLSKSRRLENLIAQLPGEKKNGLFGNLIALSLGLTPNFKSNFDLAEDAKLQLSKDTYDDDLDNLLAQIGDQYADLFLAAKNLSDAILLSDILRVNTEITKAPLSASMIKRYDEHHQDLTLLKALVRQQLPEKYKEIFFDQSKNGYAGYIDGGASQEEFYKFIKPILEKMDGTEELLVKLNREDLLRKQRTFDNGSIPHQIHLGELHAILRRQEDFYPFLKDNREKIEKILTFRIPYYVGPLARGNSRFAWMTRKSEETITPWNFEEVVDKGASAQSFIERMTNFDKNLPNEKVLPKHSLLYEYFTVYNELTKVKYVTEGMRKPAFLSGEQKKAIVDLLFKTNRKVTVKQLKEDYFKKIECFDSVEISGVEDRFNASLGTYHDLLKIIKDKDFLDNEENEDILEDIVLTLTLFEDREMIEERLKTYAHLFDDKVMKQLKRRRYTGWGRLSRKLINGIRDKQSGKTILDFLKSDGFANRNFMQLIHDDSLTFKEDIQKAQVSGQGDSLHEHIANLAGSPAIKKGILQTVKVVDELVKVMGRHKPENIVIEMARENQTTQKGQKNSRERMKRIEEGIKELGSQILKEHPVENTQLQNEKLYLYYLQNGRDMYVDQELDINRLSDYDVDAIVPQSFLKDDSIDNKVLTRSDKNRGKSDNVPSEEVVKKMKNYWRQLLNAKLITQRKFDNLTKAERGGLSELDKAGFIKRQLVETRQITKHVAQILDSRMNTKYDENDKLIREVKVITLKSKLVSDFRKDFQFYKVREINNYHHAHDAYLNAVVGTALIKKYPKLESEFVYGDYKVYDVRKMIAKSEQEIGKATAKYFFYSNIMNFFKTEITLANGEIRKRPLIETNGETGEIVWDKGRDFATVRKVLSMPQVNIVKKTEVQTGGFSKESILPKRNSDKLIARKKDWDPKKYGGFDSPTVAYSVLVVAKVEKGKSKKLKSVKELLGITIMERSSFEKNPIDFLEAKGYKEVKKDLIIKLPKYSLFELENGRKRMLASAGELQKGNELALPSKYVNFLYLASHYEKLKGSPEDNEQKQLFVEQHKHYLDEIIEQISEFSKRVILADANLDKVLSAYNKHRDKPIREQAENIIHLFTLTNLGAPAAFKYFDTTIDRKRYTSTKEVLDATLIHQSITGLYETRIDLSQLGGDPKKKRKVGGPSSGAPPPSGGSPAGSPTSTEEGTSESATPESGPGTSTEPSEGSAPGSPAGSPTSTEEGTSTEPSEGSAPGTSTEPSETGKDKVEKEKSEKETTSKKNSHKKTRPRLKNVDRSSAQHLEVTVGDLTVIITDFKEKTKSPPASSAASADQHSQSGSSSDNT

SEQ ID NO: 1037 - protein, 1547 aa, synthetic construct
  REGION 1..1547: note = Description of Artificial Sequence: Synthetic polypeptide
MGTPKKKRKVMDKKYSIGLAIGTNSVGWAVITDEYKVPSKKFKVLGNTDRHSIKKNLIGALLFDSGETAEATRLKRTARRRYTRRKNRICYLQEIFSNEMAKVDDSFFHRLEESFLVEEDKKHERHPIFGNIVDEVAYHEKYPTIYHLRKKLVDSTDKADLRLIYLALAHMIKFRGHFLIEGDLNPDNSDVDKLFIQLVQTYNQLFEENPINASGVDAKAILSARLSKSRRLENLIAQLPGEKKNGLFGNLIALSLGLTPNFKSNFDLAEDAKLQLSKDTYDDDLDNLLAQIGDQYADLFLAAKNLSDAILLSDILRVNTEITKAPLSASMIKRYDEHHQDLTLLKALVRQQLPEKYKEIFFDQSKNGYAGYIDGGASQEEFYKFIKPILEKMDGTEELLVKLNREDLLRKQRTFDNGSIPHQIHLGELHAILRRQEDFYPFLKDNREKIEKILTFRIPYYVGPLARGNSRFAWMTRKSEETITPWNFEEVVDKGASAQSFIERMTNFDKNLPNEKVLPKHSLLYEYFTVYNELTKVKYVTEGMRKPAFLSGEQKKAIVDLLFKTNRKVTVKQLKEDYFKKIECFDSVEISGVEDRFNASLGTYHDLLKIIKDKDFLDNEENEDILEDIVLTLTLFEDREMIEERLKTYAHLFDDKVMKQLKRRRYTGWGRLSRKLINGIRDKQSGKTILDFLKSDGFANRNFMQLIHDDSLTFKEDIQKAQVSGQGDSLHEHIANLAGSPAIKKGILQTVKVVDELVKVMGRHKPENIVIEMARENQTTQKGQKNSRERMKRIEEGIKELGSQILKEHPVENTQLQNEKLYLYYLQNGRDMYVDQELDINRLSDYDVDAIVPQSFLKDDSIDNKVLTRSDKNRGKSDNVPSEEVVKKMKNYWRQLLNAKLITQRKFDNLTKAERGGLSELDKAGFIKRQLVETRQITKHVAQILDSRMNTKYDENDKLIREVKVITLKSKLVSDFRKDFQFYKVREINNYHHAHDAYLNAVVGTALIKKYPKLESEFVYGDYKVYDVRKMIAKSEQEIGKATAKYFFYSNIMNFFKTEITLANGEIRKRPLIETNGETGEIVWDKGRDFATVRKVLSMPQVNIVKKTEVQTGGFSKESILPKRNSDKLIARKKDWDPKKYGGFDSPTVAYSVLVVAKVEKGKSKKLKSVKELLGITIMERSSFEKNPIDFLEAKGYKEVKKDLIIKLPKYSLFELENGRKRMLASAGELQKGNELALPSKYVNFLYLASHYEKLKGSPEDNEQKQLFVEQHKHYLDEIIEQISEFSKRVILADANLDKVLSAYNKHRDKPIREQAENIIHLFTLTNLGAPAAFKYFDTTIDRKRYTSTKEVLDATLIHQSITGLYETRIDLSQLGGDPKKKRKVGGPSSGAPPPSGGSPAGSPTSTEEGTSESATPESGPGTSTEPSEGSAPGSPAGSPTSTEEGTSTEPSEGSAPGTSTEPSETGKDEDIKLRVIGQDSSEIHFKVKMTTPLKKLKKSYCQRQGVPVNSLRFLFEGQRIADNHTPEELGMEEEDVIEVYQEQIGG

SEQ ID NO: 1038 - protein, 1547 aa, synthetic construct
  REGION 1..1547: note = Description of Artificial Sequence: Synthetic polypeptide
MGTPKKKRKVMDKKYSIGLAIGTNSVGWAVITDEYKVPSKKFKVLGNTDRHSIKKNLIGALLFDSGETAEATRLKRTARRRYTRRKNRICYLQEIFSNEMAKVDDSFFHRLEESFLVEEDKKHERHPIFGNIVDEVAYHEKYPTIYHLRKKLVDSTDKADLRLIYLALAHMIKFRGHFLIEGDLNPDNSDVDKLFIQLVQTYNQLFEENPINASGVDAKAILSARLSKSRRLENLIAQLPGEKKNGLFGNLIALSLGLTPNFKSNFDLAEDAKLQLSKDTYDDDLDNLLAQIGDQYADLFLAAKNLSDAILLSDILRVNTEITKAPLSASMIKRYDEHHQDLTLLKALVRQQLPEKYKEIFFDQSKNGYAGYIDGGASQEEFYKFIKPILEKMDGTEELLVKLNREDLLRKQRTFDNGSIPHQIHLGELHAILRRQEDFYPFLKDNREKIEKILTFRIPYYVGPLARGNSRFAWMTRKSEETITPWNFEEVVDKGASAQSFIERMTNFDKNLPNEKVLPKHSLLYEYFTVYNELTKVKYVTEGMRKPAFLSGEQKKAIVDLLFKTNRKVTVKQLKEDYFKKIECFDSVEISGVEDRFNASLGTYHDLLKIIKDKDFLDNEENEDILEDIVLTLTLFEDREMIEERLKTYAHLFDDKVMKQLKRRRYTGWGRLSRKLINGIRDKQSGKTILDFLKSDGFANRNFMQLIHDDSLTFKEDIQKAQVSGQGDSLHEHIANLAGSPAIKKGILQTVKVVDELVKVMGRHKPENIVIEMARENQTTQKGQKNSRERMKRIEEGIKELGSQILKEHPVENTQLQNEKLYLYYLQNGRDMYVDQELDINRLSDYDVDAIVPQSFLKDDSIDNKVLTRSDKNRGKSDNVPSEEVVKKMKNYWRQLLNAKLITQRKFDNLTKAERGGLSELDKAGFIKRQLVETRQITKHVAQILDSRMNTKYDENDKLIREVKVITLKSKLVSDFRKDFQFYKVREINNYHHAHDAYLNAVVGTALIKKYPKLESEFVYGDYKVYDVRKMIAKSEQEIGKATAKYFFYSNIMNFFKTEITLANGEIRKRPLIETNGETGEIVWDKGRDFATVRKVLSMPQVNIVKKTEVQTGGFSKESILPKRNSDKLIARKKDWDPKKYGGFDSPTVAYSVLVVAKVEKGKSKKLKSVKELLGITIMERSSFEKNPIDFLEAKGYKEVKKDLIIKLPKYSLFELENGRKRMLASAGELQKGNELALPSKYVNFLYLASHYEKLKGSPEDNEQKQLFVEQHKHYLDEIIEQISEFSKRVILADANLDKVLSAYNKHRDKPIREQAENIIHLFTLTNLGAPAAFKYFDTTIDRKRYTSTKEVLDATLIHQSITGLYETRIDLSQLGGDPKKKRKVGGPSSGAPPPSGGSPAGSPTSTEEGTSESATPESGPGTSTEPSEGSAPGSPAGSPTSTEEGTSTEPSEGSAPGTSTEPSETGRSEAGEPPSSLQVKPETPASAAVAVAAAAAPTTTAEKPPAEAQDEPAESLSEFKPFFGNIIITDVTANCLTVTFKEYVTV

SEQ ID NO: 1039 - protein, 1547 aa, synthetic construct
  REGION 1..1547: note = Description of Artificial Sequence: Synthetic polypeptide
MGTPKKKRKVMDKKYSIGLAIGTNSVGWAVITDEYKVPSKKFKVLGNTDRHSIKKNLIGALLFDSGETAEATRLKRTARRRYTRRKNRICYLQEIFSNEMAKVDDSFFHRLEESFLVEEDKKHERHPIFGNIVDEVAYHEKYPTIYHLRKKLVDSTDKADLRLIYLALAHMIKFRGHFLIEGDLNPDNSDVDKLFIQLVQTYNQLFEENPINASGVDAKAILSARLSKSRRLENLIAQLPGEKKNGLFGNLIALSLGLTPNFKSNFDLAEDAKLQLSKDTYDDDLDNLLAQIGDQYADLFLAAKNLSDAILLSDILRVNTEITKAPLSASMIKRYDEHHQDLTLLKALVRQQLPEKYKEIFFDQSKNGYAGYIDGGASQEEFYKFIKPILEKMDGTEELLVKLNREDLLRKQRTFDNGSIPHQIHLGELHAILRRQEDFYPFLKDNREKIEKILTFRIPYYVGPLARGNSRFAWMTRKSEETITPWNFEEVVDKGASAQSFIERMTNFDKNLPNEKVLPKHSLLYEYFTVYNELTKVKYVTEGMRKPAFLSGEQKKAIVDLLFKTNRKVTVKQLKEDYFKKIECFDSVEISGVEDRFNASLGTYHDLLKIIKDKDFLDNEENEDILEDIVLTLTLFEDREMIEERLKTYAHLFDDKVMKQLKRRRYTGWGRLSRKLINGIRDKQSGKTILDFLKSDGFANRNFMQLIHDDSLTFKEDIQKAQVSGQGDSLHEHIANLAGSPAIKKGILQTVKVVDELVKVMGRHKPENIVIEMARENQTTQKGQKNSRERMKRIEEGIKELGSQILKEHPVENTQLQNEKLYLYYLQNGRDMYVDQELDINRLSDYDVDAIVPQSFLKDDSIDNKVLTRSDKNRGKSDNVPSEEVVKKMKNYWRQLLNAKLITQRKFDNLTKAERGGLSELDKAGFIKRQLVETRQITKHVAQILDSRMNTKYDENDKLIREVKVITLKSKLVSDFRKDFQFYKVREINNYHHAHDAYLNAVVGTALIKKYPKLESEFVYGDYKVYDVRKMIAKSEQEIGKATAKYFFYSNIMNFFKTEITLANGEIRKRPLIETNGETGEIVWDKGRDFATVRKVLSMPQVNIVKKTEVQTGGFSKESILPKRNSDKLIARKKDWDPKKYGGFDSPTVAYSVLVVAKVEKGKSKKLKSVKELLGITIMERSSFEKNPIDFLEAKGYKEVKKDLIIKLPKYSLFELENGRKRMLASAGELQKGNELALPSKYVNFLYLASHYEKLKGSPEDNEQKQLFVEQHKHYLDEIIEQISEFSKRVILADANLDKVLSAYNKHRDKPIREQAENIIHLFTLTNLGAPAAFKYFDTTIDRKRYTSTKEVLDATLIHQSITGLYETRIDLSQLGGDPKKKRKVGGPSSGAPPPSGGSPAGSPTSTEEGTSESATPESGPGTSTEPSEGSAPGSPAGSPTSTEEGTSTEPSEGSAPGTSTEPSETGHRTTRIKITELNPHLMCALCGGYFIDATTIVECLHSFCKTCIVRYLETNKYCPMCDVQVHKTRPLLSIRSDKTLQDIVYK

SEQ ID NO: 1040 - protein, 1547 aa, synthetic construct
  REGION 1..1547: note = Description of Artificial Sequence: Synthetic polypeptide
MGTPKKKRKVMDKKYSIGLAIGTNSVGWAVITDEYKVPSKKFKVLGNTDRHSIKKNLIGALLFDSGETAEATRLKRTARRRYTRRKNRICYLQEIFSNEMAKVDDSFFHRLEESFLVEEDKKHERHPIFGNIVDEVAYHEKYPTIYHLRKKLVDSTDKADLRLIYLALAHMIKFRGHFLIEGDLNPDNSDVDKLFIQLVQTYNQLFEENPINASGVDAKAILSARLSKSRRLENLIAQLPGEKKNGLFGNLIALSLGLTPNFKSNFDLAEDAKLQLSKDTYDDDLDNLLAQIGDQYADLFLAAKNLSDAILLSDILRVNTEITKAPLSASMIKRYDEHHQDLTLLKALVRQQLPEKYKEIFFDQSKNGYAGYIDGGASQEEFYKFIKPILEKMDGTEELLVKLNREDLLRKQRTFDNGSIPHQIHLGELHAILRRQEDFYPFLKDNREKIEKILTFRIPYYVGPLARGNSRFAWMTRKSEETITPWNFEEVVDKGASAQSFIERMTNFDKNLPNEKVLPKHSLLYEYFTVYNELTKVKYVTEGMRKPAFLSGEQKKAIVDLLFKTNRKVTVKQLKEDYFKKIECFDSVEISGVEDRFNASLGTYHDLLKIIKDKDFLDNEENEDILEDIVLTLTLFEDREMIEERLKTYAHLFDDKVMKQLKRRRYTGWGRLSRKLINGIRDKQSGKTILDFLKSDGFANRNFMQLIHDDSLTFKEDIQKAQVSGQGDSLHEHIANLAGSPAIKKGILQTVKVVDELVKVMGRHKPENIVIEMARENQTTQKGQKNSRERMKRIEEGIKELGSQILKEHPVENTQLQNEKLYLYYLQNGRDMYVDQELDINRLSDYDVDAIVPQSFLKDDSIDNKVLTRSDKNRGKSDNVPSEEVVKKMKNYWRQLLNAKLITQRKFDNLTKAERGGLSELDKAGFIKRQLVETRQITKHVAQILDSRMNTKYDENDKLIREVKVITLKSKLVSDFRKDFQFYKVREINNYHHAHDAYLNAVVGTALIKKYPKLESEFVYGDYKVYDVRKMIAKSEQEIGKATAKYFFYSNIMNFFKTEITLANGEIRKRPLIETNGETGEIVWDKGRDFATVRKVLSMPQVNIVKKTEVQTGGFSKESILPKRNSDKLIARKKDWDPKKYGGFDSPTVAYSVLVVAKVEKGKSKKLKSVKELLGITIMERSSFEKNPIDFLEAKGYKEVKKDLIIKLPKYSLFELENGRKRMLASAGELQKGNELALPSKYVNFLYLASHYEKLKGSPEDNEQKQLFVEQHKHYLDEIIEQISEFSKRVILADANLDKVLSAYNKHRDKPIREQAENIIHLFTLTNLGAPAAFKYFDTTIDRKRYTSTKEVLDATLIHQSITGLYETRIDLSQLGGDPKKKRKVGGPSSGAPPPSGGSPAGSPTSTEEGTSESATPESGPGTSTEPSEGSAPGSPAGSPTSTEEGTSTEPSEGSAPGTSTEPSETGASQEFEVEAIVDKRQDKNGNTQYLVRWKGYDKQDDTWEPEQHLMNCEKCVHDFNRRQTEKQKKLTWTTTSRIFSNNARRR

SEQ ID NO: 1041 - protein, 1547 aa, synthetic construct
  REGION 1..1547: note = Description of Artificial Sequence: Synthetic polypeptide
MGTPKKKRKVMDKKYSIGLAIGTNSVGWAVITDEYKVPSKKFKVLGNTDRHSIKKNLIGALLFDSGETAEATRLKRTARRRYTRRKNRICYLQEIFSNEMAKVDDSFFHRLEESFLVEEDKKHERHPIFGNIVDEVAYHEKYPTIYHLRKKLVDSTDKADLRLIYLALAHMIKFRGHFLIEGDLNPDNSDVDKLFIQLVQTYNQLFEENPINASGVDAKAILSARLSKSRRLENLIAQLPGEKKNGLFGNLIALSLGLTPNFKSNFDLAEDAKLQLSKDTYDDDLDNLLAQIGDQYADLFLAAKNLSDAILLSDILRVNTEITKAPLSASMIKRYDEHHQDLTLLKALVRQQLPEKYKEIFFDQSKNGYAGYIDGGASQEEFYKFIKPILEKMDGTEELLVKLNREDLLRKQRTFDNGSIPHQIHLGELHAILRRQEDFYPFLKDNREKIEKILTFRIPYYVGPLARGNSRFAWMTRKSEETITPWNFEEVVDKGASAQSFIERMTNFDKNLPNEKVLPKHSLLYEYFTVYNELTKVKYVTEGMRKPAFLSGEQKKAIVDLLFKTNRKVTVKQLKEDYFKKIECFDSVEISGVEDRFNASLGTYHDLLKIIKDKDFLDNEENEDILEDIVLTLTLFEDREMIEERLKTYAHLFDDKVMKQLKRRRYTGWGRLSRKLINGIRDKQSGKTILDFLKSDGFANRNFMQLIHDDSLTFKEDIQKAQVSGQGDSLHEHIANLAGSPAIKKGILQTVKVVDELVKVMGRHKPENIVIEMARENQTTQKGQKNSRERMKRIEEGIKELGSQILKEHPVENTQLQNEKLYLYYLQNGRDMYVDQELDINRLSDYDVDAIVPQSFLKDDSIDNKVLTRSDKNRGKSDNVPSEEVVKKMKNYWRQLLNAKLITQRKFDNLTKAERGGLSELDKAGFIKRQLVETRQITKHVAQILDSRMNTKYDENDKLIREVKVITLKSKLVSDFRKDFQFYKVREINNYHHAHDAYLNAVVGTALIKKYPKLESEFVYGDYKVYDVRKMIAKSEQEIGKATAKYFFYSNIMNFFKTEITLANGEIRKRPLIETNGETGEIVWDKGRDFATVRKVLSMPQVNIVKKTEVQTGGFSKESILPKRNSDKLIARKKDWDPKKYGGFDSPTVAYSVLVVAKVEKGKSKKLKSVKELLGITIMERSSFEKNPIDFLEAKGYKEVKKDLIIKLPKYSLFELENGRKRMLASAGELQKGNELALPSKYVNFLYLASHYEKLKGSPEDNEQKQLFVEQHKHYLDEIIEQISEFSKRVILADANLDKVLSAYNKHRDKPIREQAENIIHLFTLTNLGAPAAFKYFDTTIDRKRYTSTKEVLDATLIHQSITGLYETRIDLSQLGGDPKKKRKVGGPSSGAPPPSGGSPAGSPTSTEEGTSESATPESGPGTSTEPSEGSAPGSPAGSPTSTEEGTSTEPSEGSAPGTSTEPSETGASGDLYEVERIVDKRKNKKGKWEYLIRWKGYGSTEDTWEPEHHLLHCEEFIDEFNGLHMSKDKRIKSGKQSSTSKLLRDS

SEQ ID NO: 1042 - protein, 1547 aa, synthetic construct
  REGION 1..1547: note = Description of Artificial Sequence: Synthetic polypeptide
MGTPKKKRKVMDKKYSIGLAIGTNSVGWAVITDEYKVPSKKFKVLGNTDRHSIKKNLIGALLFDSGETAEATRLKRTARRRYTRRKNRICYLQEIFSNEMAKVDDSFFHRLEESFLVEEDKKHERHPIFGNIVDEVAYHEKYPTIYHLRKKLVDSTDKADLRLIYLALAHMIKFRGHFLIEGDLNPDNSDVDKLFIQLVQTYNQLFEENPINASGVDAKAILSARLSKSRRLENLIAQLPGEKKNGLFGNLIALSLGLTPNFKSNFDLAEDAKLQLSKDTYDDDLDNLLAQIGDQYADLFLAAKNLSDAILLSDILRVNTEITKAPLSASMIKRYDEHHQDLTLLKALVRQQLPEKYKEIFFDQSKNGYAGYIDGGASQEEFYKFIKPILEKMDGTEELLVKLNREDLLRKQRTFDNGSIPHQIHLGELHAILRRQEDFYPFLKDNREKIEKILTFRIPYYVGPLARGNSRFAWMTRKSEETITPWNFEEVVDKGASAQSFIERMTNFDKNLPNEKVLPKHSLLYEYFTVYNELTKVKYVTEGMRKPAFLSGEQKKAIVDLLFKTNRKVTVKQLKEDYFKKIECFDSVEISGVEDRFNASLGTYHDLLKIIKDKDFLDNEENEDILEDIVLTLTLFEDREMIEERLKTYAHLFDDKVMKQLKRRRYTGWGRLSRKLINGIRDKQSGKTILDFLKSDGFANRNFMQLIHDDSLTFKEDIQKAQVSGQGDSLHEHIANLAGSPAIKKGILQTVKVVDELVKVMGRHKPENIVIEMARENQTTQKGQKNSRERMKRIEEGIKELGSQILKEHPVENTQLQNEKLYLYYLQNGRDMYVDQELDINRLSDYDVDAIVPQSFLKDDSIDNKVLTRSDKNRGKSDNVPSEEVVKKMKNYWRQLLNAKLITQRKFDNLTKAERGGLSELDKAGFIKRQLVETRQITKHVAQILDSRMNTKYDENDKLIREVKVITLKSKLVSDFRKDFQFYKVREINNYHHAHDAYLNAVVGTALIKKYPKLESEFVYGDYKVYDVRKMIAKSEQEIGKATAKYFFYSNIMNFFKTEITLANGEIRKRPLIETNGETGEIVWDKGRDFATVRKVLSMPQVNIVKKTEVQTGGFSKESILPKRNSDKLIARKKDWDPKKYGGFDSPTVAYSVLVVAKVEKGKSKKLKSVKELLGITIMERSSFEKNPIDFLEAKGYKEVKKDLIIKLPKYSLFELENGRKRMLASAGELQKGNELALPSKYVNFLYLASHYEKLKGSPEDNEQKQLFVEQHKHYLDEIIEQISEFSKRVILADANLDKVLSAYNKHRDKPIREQAENIIHLFTLTNLGAPAAFKYFDTTIDRKRYTSTKEVLDATLIHQSITGLYETRIDLSQLGGDPKKKRKVGGPSSGAPPPSGGSPAGSPTSTEEGTSESATPESGPGTSTEPSEGSAPGSPAGSPTSTEEGTSTEPSEGSAPGTSTEPSETGTLIRKADLENHNKDGGFWTVIDGKVYDIKDFQTQSLTGNSILAQFAGEDPVVALEAALQFEDTRESMHAFCVGQYLEPDQ

SEQ ID NO: 1043 - protein, 1547 aa, synthetic construct
  REGION 1..1547: note = Description of Artificial Sequence: Synthetic polypeptide
MGTPKKKRKVMDKKYSIGLAIGTNSVGWAVITDEYKVPSKKFKVLGNTDRHSIKKNLIGALLFDSGETAEATRLKRTARRRYTRRKNRICYLQEIFSNEMAKVDDSFFHRLEESFLVEEDKKHERHPIFGNIVDEVAYHEKYPTIYHLRKKLVDSTDKADLRLIYLALAHMIKFRGHFLIEGDLNPDNSDVDKLFIQLVQTYNQLFEENPINASGVDAKAILSARLSKSRRLENLIAQLPGEKKNGLFGNLIALSLGLTPNFKSNFDLAEDAKLQLSKDTYDDDLDNLLAQIGDQYADLFLAAKNLSDAILLSDILRVNTEITKAPLSASMIKRYDEHHQDLTLLKALVRQQLPEKYKEIFFDQSKNGYAGYIDGGASQEEFYKFIKPILEKMDGTEELLVKLNREDLLRKQRTFDNGSIPHQIHLGELHAILRRQEDFYPFLKDNREKIEKILTFRIPYYVGPLARGNSRFAWMTRKSEETITPWNFEEVVDKGASAQSFIERMTNFDKNLPNEKVLPKHSLLYEYFTVYNELTKVKYVTEGMRKPAFLSGEQKKAIVDLLFKTNRKVTVKQLKEDYFKKIECFDSVEISGVEDRFNASLGTYHDLLKIIKDKDFLDNEENEDILEDIVLTLTLFEDREMIEERLKTYAHLFDDKVMKQLKRRRYTGWGRLSRKLINGIRDKQSGKTILDFLKSDGFANRNFMQLIHDDSLTFKEDIQKAQVSGQGDSLHEHIANLAGSPAIKKGILQTVKVVDELVKVMGRHKPENIVIEMARENQTTQKGQKNSRERMKRIEEGIKELGSQILKEHPVENTQLQNEKLYLYYLQNGRDMYVDQELDINRLSDYDVDAIVPQSFLKDDSIDNKVLTRSDKNRGKSDNVPSEEVVKKMKNYWRQLLNAKLITQRKFDNLTKAERGGLSELDKAGFIKRQLVETRQITKHVAQILDSRMNTKYDENDKLIREVKVITLKSKLVSDFRKDFQFYKVREINNYHHAHDAYLNAVVGTALIKKYPKLESEFVYGDYKVYDVRKMIAKSEQEIGKATAKYFFYSNIMNFFKTEITLANGEIRKRPLIETNGETGEIVWDKGRDFATVRKVLSMPQVNIVKKTEVQTGGFSKESILPKRNSDKLIARKKDWDPKKYGGFDSPTVAYSVLVVAKVEKGKSKKLKSVKELLGITIMERSSFEKNPIDFLEAKGYKEVKKDLIIKLPKYSLFELENGRKRMLASAGELQKGNELALPSKYVNFLYLASHYEKLKGSPEDNEQKQLFVEQHKHYLDEIIEQISEFSKRVILADANLDKVLSAYNKHRDKPIREQAENIIHLFTLTNLGAPAAFKYFDTTIDRKRYTSTKEVLDATLIHQSITGLYETRIDLSQLGGDPKKKRKVGGPSSGAPPPSGGSPAGSPTSTEEGTSESATPESGPGTSTEPSEGSAPGSPAGSPTSTEEGTSTEPSEGSAPGTSTEPSETGSDHSLGISRSKTPVDDPMSLLYNMNDCYSKLKELVPSIPQNKKVSKMEILQHVIDYILDLQIALDSHPTIVSLHHQRPGQ

SEQ ID NO: 1044 - protein, 1547 aa, synthetic construct
  REGION 1..1547: note = Description of Artificial Sequence: Synthetic polypeptide
MGTPKKKRKVMDKKYSIGLAIGTNSVGWAVITDEYKVPSKKFKVLGNTDRHSIKKNLIGALLFDSGETAEATRLKRTARRRYTRRKNRICYLQEIFSNEMAKVDDSFFHRLEESFLVEEDKKHERHPIFGNIVDEVAYHEKYPTIYHLRKKLVDSTDKADLRLIYLALAHMIKFRGHFLIEGDLNPDNSDVDKLFIQLVQTYNQLFEENPINASGVDAKAILSARLSKSRRLENLIAQLPGEKKNGLFGNLIALSLGLTPNFKSNFDLAEDAKLQLSKDTYDDDLDNLLAQIGDQYADLFLAAKNLSDAILLSDILRVNTEITKAPLSASMIKRYDEHHQDLTLLKALVRQQLPEKYKEIFFDQSKNGYAGYIDGGASQEEFYKFIKPILEKMDGTEELLVKLNREDLLRKQRTFDNGSIPHQIHLGELHAILRRQEDFYPFLKDNREKIEKILTFRIPYYVGPLARGNSRFAWMTRKSEETITPWNFEEVVDKGASAQSFIERMTNFDKNLPNEKVLPKHSLLYEYFTVYNELTKVKYVTEGMRKPAFLSGEQKKAIVDLLFKTNRKVTVKQLKEDYFKKIECFDSVEISGVEDRFNASLGTYHDLLKIIKDKDFLDNEENEDILEDIVLTLTLFEDREMIEERLKTYAHLFDDKVMKQLKRRRYTGWGRLSRKLINGIRDKQSGKTILDFLKSDGFANRNFMQLIHDDSLTFKEDIQKAQVSGQGDSLHEHIANLAGSPAIKKGILQTVKVVDELVKVMGRHKPENIVIEMARENQTTQKGQKNSRERMKRIEEGIKELGSQILKEHPVENTQLQNEKLYLYYLQNGRDMYVDQELDINRLSDYDVDAIVPQSFLKDDSIDNKVLTRSDKNRGKSDNVPSEEVVKKMKNYWRQLLNAKLITQRKFDNLTKAERGGLSELDKAGFIKRQLVETRQITKHVAQILDSRMNTKYDENDKLIREVKVITLKSKLVSDFRKDFQFYKVREINNYHHAHDAYLNAVVGTALIKKYPKLESEFVYGDYKVYDVRKMIAKSEQEIGKATAKYFFYSNIMNFFKTEITLANGEIRKRPLIETNGETGEIVWDKGRDFATVRKVLSMPQVNIVKKTEVQTGGFSKESILPKRNSDKLIARKKDWDPKKYGGFDSPTVAYSVLVVAKVEKGKSKKLKSVKELLGITIMERSSFEKNPIDFLEAKGYKEVKKDLIIKLPKYSLFELENGRKRMLASAGELQKGNELALPSKYVNFLYLASHYEKLKGSPEDNEQKQLFVEQHKHYLDEIIEQISEFSKRVILADANLDKVLSAYNKHRDKPIREQAENIIHLFTLTNLGAPAAFKYFDTTIDRKRYTSTKEVLDATLIHQSITGLYETRIDLSQLGGDPKKKRKVGGPSSGAPPPSGGSPAGSPTSTEEGTSESATPESGPGTSTEPSEGSAPGSPAGSPTSTEEGTSTEPSEGSAPGTSTEPSETGKDPNEPQKPVSAYALFFRDTQAAIKGQNPNATFGEVSKIVASMWDGLGEEQKQVYKKKTEAAKKEYLKQLAAYRASLVSK

SEQ ID NO: 1045 - protein, 1547 aa, synthetic construct
  REGION 1..1547: note = Description of Artificial Sequence: Synthetic polypeptide
MGTPKKKRKVMDKKYSIGLAIGTNSVGWAVITDEYKVPSKKFKVLGNTDRHSIKKNLIGALLFDSGETAEATRLKRTARRRYTRRKNRICYLQEIFSNEMAKVDDSFFHRLEESFLVEEDKKHERHPIFGNIVDEVAYHEKYPTIYHLRKKLVDSTDKADLRLIYLALAHMIKFRGHFLIEGDLNPDNSDVDKLFIQLVQTYNQLFEENPINASGVDAKAILSARLSKSRRLENLIAQLPGEKKNGLFGNLIALSLGLTPNFKSNFDLAEDAKLQLSKDTYDDDLDNLLAQIGDQYADLFLAAKNLSDAILLSDILRVNTEITKAPLSASMIKRYDEHHQDLTLLKALVRQQLPEKYKEIFFDQSKNGYAGYIDGGASQEEFYKFIKPILEKMDGTEELLVKLNREDLLRKQRTFDNGSIPHQIHLGELHAILRRQEDFYPFLKDNREKIEKILTFRIPYYVGPLARGNSRFAWMTRKSEETITPWNFEEVVDKGASAQSFIERMTNFDKNLPNEKVLPKHSLLYEYFTVYNELTKVKYVTEGMRKPAFLSGEQKKAIVDLLFKTNRKVTVKQLKEDYFKKIECFDSVEISGVEDRFNASLGTYHDLLKIIKDKDFLDNEENEDILEDIVLTLTLFEDREMIEERLKTYAHLFDDKVMKQLKRRRYTGWGRLSRKLINGIRDKQSGKTILDFLKSDGFANRNFMQLIHDDSLTFKEDIQKAQVSGQGDSLHEHIANLAGSPAIKKGILQTVKVVDELVKVMGRHKPENIVIEMARENQTTQKGQKNSRERMKRIEEGIKELGSQILKEHPVENTQLQNEKLYLYYLQNGRDMYVDQELDINRLSDYDVDAIVPQSFLKDDSIDNKVLTRSDKNRGKSDNVPSEEVVKKMKNYWRQLLNAKLITQRKFDNLTKAERGGLSELDKAGFIKRQLVETRQITKHVAQILDSRMNTKYDENDKLIREVKVITLKSKLVSDFRKDFQFYKVREINNYHHAHDAYLNAVVGTALIKKYPKLESEFVYGDYKVYDVRKMIAKSEQEIGKATAKYFFYSNIMNFFKTEITLANGEIRKRPLIETNGETGEIVWDKGRDFATVRKVLSMPQVNIVKKTEVQTGGFSKESILPKRNSDKLIARKKDWDPKKYGGFDSPTVAYSVLVVAKVEKGKSKKLKSVKELLGITIMERSSFEKNPIDFLEAKGYKEVKKDLIIKLPKYSLFELENGRKRMLASAGELQKGNELALPSKYVNFLYLASHYEKLKGSPEDNEQKQLFVEQHKHYLDEIIEQISEFSKRVILADANLDKVLSAYNKHRDKPIREQAENIIHLFTLTNLGAPAAFKYFDTTIDRKRYTSTKEVLDATLIHQSITGLYETRIDLSQLGGDPKKKRKVGGPSSGAPPPSGGSPAGSPTSTEEGTSESATPESGPGTSTEPSEGSAPGSPAGSPTSTEEGTSTEPSEGSAPGTSTEPSETGDASRLSGRDPSSWTVEDVMQFVREADPQLGPHADLFRKHEIDGKALLLLRSDMMMKYMGLKLGPALKLSYHIDRLKQGKF

SEQ ID NO: 1046 - protein, 1547 aa, synthetic construct
  REGION 1..1547: note = Description of Artificial Sequence: Synthetic polypeptide
MGTPKKKRKVMDKKYSIGLAIGTNSVGWAVITDEYKVPSKKFKVLGNTDRHSIKKNLIGALLFDSGETAEATRLKRTARRRYTRRKNRICYLQEIFSNEMAKVDDSFFHRLEESFLVEEDKKHERHPIFGNIVDEVAYHEKYPTIYHLRKKLVDSTDKADLRLIYLALAHMIKFRGHFLIEGDLNPDNSDVDKLFIQLVQTYNQLFEENPINASGVDAKAILSARLSKSRRLENLIAQLPGEKKNGLFGNLIALSLGLTPNFKSNFDLAEDAKLQLSKDTYDDDLDNLLAQIGDQYADLFLAAKNLSDAILLSDILRVNTEITKAPLSASMIKRYDEHHQDLTLLKALVRQQLPEKYKEIFFDQSKNGYAGYIDGGASQEEFYKFIKPILEKMDGTEELLVKLNREDLLRKQRTFDNGSIPHQIHLGELHAILRRQEDFYPFLKDNREKIEKILTFRIPYYVGPLARGNSRFAWMTRKSEETITPWNFEEVVDKGASAQSFIERMTNFDKNLPNEKVLPKHSLLYEYFTVYNELTKVKYVTEGMRKPAFLSGEQKKAIVDLLFKTNRKVTVKQLKEDYFKKIECFDSVEISGVEDRFNASLGTYHDLLKIIKDKDFLDNEENEDILEDIVLTLTLFEDREMIEERLKTYAHLFDDKVMKQLKRRRYTGWGRLSRKLINGIRDKQSGKTILDFLKSDGFANRNFMQLIHDDSLTFKEDIQKAQVSGQGDSLHEHIANLAGSPAIKKGILQTVKVVDELVKVMGRHKPENIVIEMARENQTTQKGQKNSRERMKRIEEGIKELGSQILKEHPVENTQLQNEKLYLYYLQNGRDMYVDQELDINRLSDYDVDAIVPQSFLKDDSIDNKVLTRSDKNRGKSDNVPSEEVVKKMKNYWRQLLNAKLITQRKFDNLTKAERGGLSELDKAGFIKRQLVETRQITKHVAQILDSRMNTKYDENDKLIREVKVITLKSKLVSDFRKDFQFYKVREINNYHHAHDAYLNAVVGTALIKKYPKLESEFVYGDYKVYDVRKMIAKSEQEIGKATAKYFFYSNIMNFFKTEITLANGEIRKRPLIETNGETGEIVWDKGRDFATVRKVLSMPQVNIVKKTEVQTGGFSKESILPKRNSDKLIARKKDWDPKKYGGFDSPTVAYSVLVVAKVEKGKSKKLKSVKELLGITIMERSSFEKNPIDFLEAKGYKEVKKDLIIKLPKYSLFELENGRKRMLASAGELQKGNELALPSKYVNFLYLASHYEKLKGSPEDNEQKQLFVEQHKHYLDEIIEQISEFSKRVILADANLDKVLSAYNKHRDKPIREQAENIIHLFTLTNLGAPAAFKYFDTTIDRKRYTSTKEVLDATLIHQSITGLYETRIDLSQLGGDPKKKRKVGGPSSGAPPPSGGSPAGSPTSTEEGTSESATPESGPGTSTEPSEGSAPGSPAGSPTSTEEGTSTEPSEGSAPGTSTEPSETGELSAIGEQVFAVESIRKKRVRKGKVEYLVKWKGWPPKYSTWEPEEHILDPRLVMAYEEKEERDRASGYRKRGPKPKRLLL

SEQ ID NO: 1047 - protein, 1547 aa, synthetic construct
  REGION 1..1547: note = Description of Artificial Sequence: Synthetic polypeptide
MGTPKKKRKVMDKKYSIGLAIGTNSVGWAVITDEYKVPSKKFKVLGNTDRHSIKKNLIGALLFDSGETAEATRLKRTARRRYTRRKNRICYLQEIFSNEMAKVDDSFFHRLEESFLVEEDKKHERHPIFGNIVDEVAYHEKYPTIYHLRKKLVDSTDKADLRLIYLALAHMIKFRGHFLIEGDLNPDNSDVDKLFIQLVQTYNQLFEENPINASGVDAKAILSARLSKSRRLENLIAQLPGEKKNGLFGNLIALSLGLTPNFKSNFDLAEDAKLQLSKDTYDDDLDNLLAQIGDQYADLFLAAKNLSDAILLSDILRVNTEITKAPLSASMIKRYDEHHQDLTLLKALVRQQLPEKYKEIFFDQSKNGYAGYIDGGASQEEFYKFIKPILEKMDGTEELLVKLNREDLLRKQRTFDNGSIPHQIHLGELHAILRRQEDFYPFLKDNREKIEKILTFRIPYYVGPLARGNSRFAWMTRKSEETITPWNFEEVVDKGASAQSFIERMTNFDKNLPNEKVLPKHSLLYEYFTVYNELTKVKYVTEGMRKPAFLSGEQKKAIVDLLFKTNRKVTVKQLKEDYFKKIECFDSVEISGVEDRFNASLGTYHDLLKIIKDKDFLDNEENEDILEDIVLTLTLFEDREMIEERLKTYAHLFDDKVMKQLKRRRYTGWGRLSRKLINGIRDKQSGKTILDFLKSDGFANRNFMQLIHDDSLTFKEDIQKAQVSGQGDSLHEHIANLAGSPAIKKGILQTVKVVDELVKVMGRHKPENIVIEMARENQTTQKGQKNSRERMKRIEEGIKELGSQILKEHPVENTQLQNEKLYLYYLQNGRDMYVDQELDINRLSDYDVDAIVPQSFLKDDSIDNKVLTRSDKNRGKSDNVPSEEVVKKMKNYWRQLLNAKLITQRKFDNLTKAERGGLSELDKAGFIKRQLVETRQITKHVAQILDSRMNTKYDENDKLIREVKVITLKSKLVSDFRKDFQFYKVREINNYHHAHDAYLNAVVGTALIKKYPKLESEFVYGDYKVYDVRKMIAKSEQEIGKATAKYFFYSNIMNFFKTEITLANGEIRKRPLIETNGETGEIVWDKGRDFATVRKVLSMPQVNIVKKTEVQTGGFSKESILPKRNSDKLIARKKDWDPKKYGGFDSPTVAYSVLVVAKVEKGKSKKLKSVKELLGITIMERSSFEKNPIDFLEAKGYKEVKKDLIIKLPKYSLFELENGRKRMLASAGELQKGNELALPSKYVNFLYLASHYEKLKGSPEDNEQKQLFVEQHKHYLDEIIEQISEFSKRVILADANLDKVLSAYNKHRDKPIREQAENIIHLFTLTNLGAPAAFKYFDTTIDRKRYTSTKEVLDATLIHQSITGLYETRIDLSQLGGDPKKKRKVGGPSSGAPPPSGGSPAGSPTSTEEGTSESATPESGPGTSTEPSEGSAPGSPAGSPTSTEEGTSTEPSEGSAPGTSTEPSETGGGAGARLPALLDEQQVNVLLYDMNGCYSRLKELVPTLPQNRKVSKVEILQHVIDYIRDLQLELNSESEVGTPGGRGLPVR

SEQ ID NO: 1048 - protein, 1547 aa, synthetic construct
  REGION 1..1547: note = Description of Artificial Sequence: Synthetic polypeptide
MGTPKKKRKVMDKKYSIGLAIGTNSVGWAVITDEYKVPSKKFKVLGNTDRHSIKKNLIGALLFDSGETAEATRLKRTARRRYTRRKNRICYLQEIFSNEMAKVDDSFFHRLEESFLVEEDKKHERHPIFGNIVDEVAYHEKYPTIYHLRKKLVDSTDKADLRLIYLALAHMIKFRGHFLIEGDLNPDNSDVDKLFIQLVQTYNQLFEENPINASGVDAKAILSARLSKSRRLENLIAQLPGEKKNGLFGNLIALSLGLTPNFKSNFDLAEDAKLQLSKDTYDDDLDNLLAQIGDQYADLFLAAKNLSDAILLSDILRVNTEITKAPLSASMIKRYDEHHQDLTLLKALVRQQLPEKYKEIFFDQSKNGYAGYIDGGASQEEFYKFIKPILEKMDGTEELLVKLNREDLLRKQRTFDNGSIPHQIHLGELHAILRRQEDFYPFLKDNREKIEKILTFRIPYYVGPLARGNSRFAWMTRKSEETITPWNFEEVVDKGASAQSFIERMTNFDKNLPNEKVLPKHSLLYEYFTVYNELTKVKYVTEGMRKPAFLSGEQKKAIVDLLFKTNRKVTVKQLKEDYFKKIECFDSVEISGVEDRFNASLGTYHDLLKIIKDKDFLDNEENEDILEDIVLTLTLFEDREMIEERLKTYAHLFDDKVMKQLKRRRYTGWGRLSRKLINGIRDKQSGKTILDFLKSDGFANRNFMQLIHDDSLTFKEDIQKAQVSGQGDSLHEHIANLAGSPAIKKGILQTVKVVDELVKVMGRHKPENIVIEMARENQTTQKGQKNSRERMKRIEEGIKELGSQILKEHPVENTQLQNEKLYLYYLQNGRDMYVDQELDINRLSDYDVDAIVPQSFLKDDSIDNKVLTRSDKNRGKSDNVPSEEVVKKMKNYWRQLLNAKLITQRKFDNLTKAERGGLSELDKAGFIKRQLVETRQITKHVAQILDSRMNTKYDENDKLIREVKVITLKSKLVSDFRKDFQFYKVREINNYHHAHDAYLNAVVGTALIKKYPKLESEFVYGDYKVYDVRKMIAKSEQEIGKATAKYFFYSNIMNFFKTEITLANGEIRKRPLIETNGETGEIVWDKGRDFATVRKVLSMPQVNIVKKTEVQTGGFSKESILPKRNSDKLIARKKDWDPKKYGGFDSPTVAYSVLVVAKVEKGKSKKLKSVKELLGITIMERSSFEKNPIDFLEAKGYKEVKKDLIIKLPKYSLFELENGRKRMLASAGELQKGNELALPSKYVNFLYLASHYEKLKGSPEDNEQKQLFVEQHKHYLDEIIEQISEFSKRVILADANLDKVLSAYNKHRDKPIREQAENIIHLFTLTNLGAPAAFKYFDTTIDRKRYTSTKEVLDATLIHQSITGLYETRIDLSQLGGDPKKKRKVGGPSSGAPPPSGGSPAGSPTSTEEGTSESATPESGPGTSTEPSEGSAPGSPAGSPTSTEEGTSTEPSEGSAPGTSTEPSETGVVMAASPGSLHSPQQLAEEATRKRELRLMKNREAAKECRRRKKEYVKCLESRVAVLEVQNKKLIEELETLKDICSPKTDY

SEQ ID NO: 1049 - protein, 1547 aa, synthetic construct
  REGION 1..1547: note = Description of Artificial Sequence: Synthetic polypeptide
MGTPKKKRKVMDKKYSIGLAIGTNSVGWAVITDEYKVPSKKFKVLGNTDRHSIKKNLIGALLFDSGETAEATRLKRTARRRYTRRKNRICYLQEIFSNEMAKVDDSFFHRLEESFLVEEDKKHERHPIFGNIVDEVAYHEKYPTIYHLRKKLVDSTDKADLRLIYLALAHMIKFRGHFLIEGDLNPDNSDVDKLFIQLVQTYNQLFEENPINASGVDAKAILSARLSKSRRLENLIAQLPGEKKNGLFGNLIALSLGLTPNFKSNFDLAEDAKLQLSKDTYDDDLDNLLAQIGDQYADLFLAAKNLSDAILLSDILRVNTEITKAPLSASMIKRYDEHHQDLTLLKALVRQQLPEKYKEIFFDQSKNGYAGYIDGGASQEEFYKFIKPILEKMDGTEELLVKLNREDLLRKQRTFDNGSIPHQIHLGELHAILRRQEDFYPFLKDNREKIEKILTFRIPYYVGPLARGNSRFAWMTRKSEETITPWNFEEVVDKGASAQSFIERMTNFDKNLPNEKVLPKHSLLYEYFTVYNELTKVKYVTEGMRKPAFLSGEQKKAIVDLLFKTNRKVTVKQLKEDYFKKIECFDSVEISGVEDRFNASLGTYHDLLKIIKDKDFLDNEENEDILEDIVLTLTLFEDREMIEERLKTYAHLFDDKVMKQLKRRRYTGWGRLSRKLINGIRDKQSGKTILDFLKSDGFANRNFMQLIHDDSLTFKEDIQKAQVSGQGDSLHEHIANLAGSPAIKKGILQTVKVVDELVKVMGRHKPENIVIEMARENQTTQKGQKNSRERMKRIEEGIKELGSQILKEHPVENTQLQNEKLYLYYLQNGRDMYVDQELDINRLSDYDVDAIVPQSFLKDDSIDNKVLTRSDKNRGKSDNVPSEEVVKKMKNYWRQLLNAKLITQRKFDNLTKAERGGLSELDKAGFIKRQLVETRQITKHVAQILDSRMNTKYDENDKLIREVKVITLKSKLVSDFRKDFQFYKVREINNYHHAHDAYLNAVVGTALIKKYPKLESEFVYGDYKVYDVRKMIAKSEQEIGKATAKYFFYSNIMNFFKTEITLANGEIRKRPLIETNGETGEIVWDKGRDFATVRKVLSMPQVNIVKKTEVQTGGFSKESILPKRNSDKLIARKKDWDPKKYGGFDSPTVAYSVLVVAKVEKGKSKKLKSVKELLGITIMERSSFEKNPIDFLEAKGYKEVKKDLIIKLPKYSLFELENGRKRMLASAGELQKGNELALPSKYVNFLYLASHYEKLKGSPEDNEQKQLFVEQHKHYLDEIIEQISEFSKRVILADANLDKVLSAYNKHRDKPIREQAENIIHLFTLTNLGAPAAFKYFDTTIDRKRYTSTKEVLDATLIHQSITGLYETRIDLSQLGGDPKKKRKVGGPSSGAPPPSGGSPAGSPTSTEEGTSESATPESGPGTSTEPSEGSAPGSPAGSPTSTEEGTSTEPSEGSAPGTSTEPSETGGGGPGGRPGREPRQRHTANARERDRTNSVNTAFTALRTLIPTEPADRKLSKIETLRLASSYISHLGNVLLAGEACGDGQP

SEQ ID NO: 1050 - protein, 1547 aa, synthetic construct
  REGION 1..1547: note = Description of Artificial Sequence: Synthetic polypeptide
MGTPKKKRKVMDKKYSIGLAIGTNSVGWAVITDEYKVPSKKFKVLGNTDRHSIKKNLIGALLFDSGETAEATRLKRTARRRYTRRKNRICYLQEIFSNEMAKVDDSFFHRLEESFLVEEDKKHERHPIFGNIVDEVAYHEKYPTIYHLRKKLVDSTDKADLRLIYLALAHMIKFRGHFLIEGDLNPDNSDVDKLFIQLVQTYNQLFEENPINASGVDAKAILSARLSKSRRLENLIAQLPGEKKNGLFGNLIALSLGLTPNFKSNFDLAEDAKLQLSKDTYDDDLDNLLAQIGDQYADLFLAAKNLSDAILLSDILRVNTEITKAPLSASMIKRYDEHHQDLTLLKALVRQQLPEKYKEIFFDQSKNGYAGYIDGGASQEEFYKFIKPILEKMDGTEELLVKLNREDLLRKQRTFDNGSIPHQIHLGELHAILRRQEDFYPFLKDNREKIEKILTFRIPYYVGPLARGNSRFAWMTRKSEETITPWNFEEVVDKGASAQSFIERMTNFDKNLPNEKVLPKHSLLYEYFTVYNELTKVKYVTEGMRKPAFLSGEQKKAIVDLLFKTNRKVTVKQLKEDYFKKIECFDSVEISGVEDRFNASLGTYHDLLKIIKDKDFLDNEENEDILEDIVLTLTLFEDREMIEERLKTYAHLFDDKVMKQLKRRRYTGWGRLSRKLINGIRDKQSGKTILDFLKSDGFANRNFMQLIHDDSLTFKEDIQKAQVSGQGDSLHEHIANLAGSPAIKKGILQTVKVVDELVKVMGRHKPENIVIEMARENQTTQKGQKNSRERMKRIEEGIKELGSQILKEHPVENTQLQNEKLYLYYLQNGRDMYVDQELDINRLSDYDVDAIVPQSFLKDDSIDNKVLTRSDKNRGKSDNVPSEEVVKKMKNYWRQLLNAKLITQRKFDNLTKAERGGLSELDKAGFIKRQLVETRQITKHVAQILDSRMNTKYDENDKLIREVKVITLKSKLVSDFRKDFQFYKVREINNYHHAHDAYLNAVVGTALIKKYPKLESEFVYGDYKVYDVRKMIAKSEQEIGKATAKYFFYSNIMNFFKTEITLANGEIRKRPLIETNGETGEIVWDKGRDFATVRKVLSMPQVNIVKKTEVQTGGFSKESILPKRNSDKLIARKKDWDPKKYGGFDSPTVAYSVLVVAKVEKGKSKKLKSVKELLGITIMERSSFEKNPIDFLEAKGYKEVKKDLIIKLPKYSLFELENGRKRMLASAGELQKGNELALPSKYVNFLYLASHYEKLKGSPEDNEQKQLFVEQHKHYLDEIIEQISEFSKRVILADANLDKVLSAYNKHRDKPIREQAENIIHLFTLTNLGAPAAFKYFDTTIDRKRYTSTKEVLDATLIHQSITGLYETRIDLSQLGGDPKKKRKVGGPSSGAPPPSGGSPAGSPTSTEEGTSESATPESGPGTSTEPSEGSAPGSPAGSPTSTEEGTSTEPSEGSAPGTSTEPSETGSGFGYSLPQQQPAAVARRNERERNRVKLVNLGFATLREHVPNGAANKKMSKVETLRSAVEYIRALQQLLDEHDAVSAAFQ

SEQ ID NO: 1051 - protein, 1547 aa, synthetic construct
  REGION 1..1547: note = Description of Artificial Sequence: Synthetic polypeptide
MGTPKKKRKVMDKKYSIGLAIGTNSVGWAVITDEYKVPSKKFKVLGNTDRHSIKKNLIGALLFDSGETAEATRLKRTARRRYTRRKNRICYLQEIFSNEMAKVDDSFFHRLEESFLVEEDKKHERHPIFGNIVDEVAYHEKYPTIYHLRKKLVDSTDKADLRLIYLALAHMIKFRGHFLIEGDLNPDNSDVDKLFIQLVQTYNQLFEENPINASGVDAKAILSARLSKSRRLENLIAQLPGEKKNGLFGNLIALSLGLTPNFKSNFDLAEDAKLQLSKDTYDDDLDNLLAQIGDQYADLFLAAKNLSDAILLSDILRVNTEITKAPLSASMIKRYDEHHQDLTLLKALVRQQLPEKYKEIFFDQSKNGYAGYIDGGASQEEFYKFIKPILEKMDGTEELLVKLNREDLLRKQRTFDNGSIPHQIHLGELHAILRRQEDFYPFLKDNREKIEKILTFRIPYYVGPLARGNSRFAWMTRKSEETITPWNFEEVVDKGASAQSFIERMTNFDKNLPNEKVLPKHSLLYEYFTVYNELTKVKYVTEGMRKPAFLSGEQKKAIVDLLFKTNRKVTVKQLKEDYFKKIECFDSVEISGVEDRFNASLGTYHDLLKIIKDKDFLDNEENEDILEDIVLTLTLFEDREMIEERLKTYAHLFDDKVMKQLKRRRYTGWGRLSRKLINGIRDKQSGKTILDFLKSDGFANRNFMQLIHDDSLTFKEDIQKAQVSGQGDSLHEHIANLAGSPAIKKGILQTVKVVDELVKVMGRHKPENIVIEMARENQTTQKGQKNSRERMKRIEEGIKELGSQILKEHPVENTQLQNEKLYLYYLQNGRDMYVDQELDINRLSDYDVDAIVPQSFLKDDSIDNKVLTRSDKNRGKSDNVPSEEVVKKMKNYWRQLLNAKLITQRKFDNLTKAERGGLSELDKAGFIKRQLVETRQITKHVAQILDSRMNTKYDENDKLIREVKVITLKSKLVSDFRKDFQFYKVREINNYHHAHDAYLNAVVGTALIKKYPKLESEFVYGDYKVYDVRKMIAKSEQEIGKATAKYFFYSNIMNFFKTEITLANGEIRKRPLIETNGETGEIVWDKGRDFATVRKVLSMPQVNIVKKTEVQTGGFSKESILPKRNSDKLIARKKDWDPKKYGGFDSPTVAYSVLVVAKVEKGKSKKLKSVKELLGITIMERSSFEKNPIDFLEAKGYKEVKKDLIIKLPKYSLFELENGRKRMLASAGELQKGNELALPSKYVNFLYLASHYEKLKGSPEDNEQKQLFVEQHKHYLDEIIEQISEFSKRVILADANLDKVLSAYNKHRDKPIREQAENIIHLFTLTNLGAPAAFKYFDTTIDRKRYTSTKEVLDATLIHQSITGLYETRIDLSQLGGDPKKKRKVGGPSSGAPPPSGGSPAGSPTSTEEGTSESATPESGPGTSTEPSEGSAPGSPAGSPTSTEEGTSTEPSEGSAPGTSTEPSETGKQGFSKDPSTWSVDEVIQFMKHTDPQISGPLADLFRQHEIDGKALFLLKSDVMMKYMGLKLGPALKLCYYIEKLKEGKYS

SEQ ID NO: 1052 - protein, 1547 aa, synthetic construct
  REGION 1..1547: note = Description of Artificial Sequence: Synthetic polypeptide
MGTPKKKRKVMDKKYSIGLAIGTNSVGWAVITDEYKVPSKKFKVLGNTDRHSIKKNLIGALLFDSGETAEATRLKRTARRRYTRRKNRICYLQEIFSNEMAKVDDSFFHRLEESFLVEEDKKHERHPIFGNIVDEVAYHEKYPTIYHLRKKLVDSTDKADLRLIYLALAHMIKFRGHFLIEGDLNPDNSDVDKLFIQLVQTYNQLFEENPINASGVDAKAILSARLSKSRRLENLIAQLPGEKKNGLFGNLIALSLGLTPNFKSNFDLAEDAKLQLSKDTYDDDLDNLLAQIGDQYADLFLAAKNLSDAILLSDILRVNTEITKAPLSASMIKRYDEHHQDLTLLKALVRQQLPEKYKEIFFDQSKNGYAGYIDGGASQEEFYKFIKPILEKMDGTEELLVKLNREDLLRKQRTFDNGSIPHQIHLGELHAILRRQEDFYPFLKDNREKIEKILTFRIPYYVGPLARGNSRFAWMTRKSEETITPWNFEEVVDKGASAQSFIERMTNFDKNLPNEKVLPKHSLLYEYFTVYNELTKVKYVTEGMRKPAFLSGEQKKAIVDLLFKTNRKVTVKQLKEDYFKKIECFDSVEISGVEDRFNASLGTYHDLLKIIKDKDFLDNEENEDILEDIVLTLTLFEDREMIEERLKTYAHLFDDKVMKQLKRRRYTGWGRLSRKLINGIRDKQSGKTILDFLKSDGFANRNFMQLIHDDSLTFKEDIQKAQVSGQGDSLHEHIANLAGSPAIKKGILQTVKVVDELVKVMGRHKPENIVIEMARENQTTQKGQKNSRERMKRIEEGIKELGSQILKEHPVENTQLQNEKLYLYYLQNGRDMYVDQELDINRLSDYDVDAIVPQSFLKDDSIDNKVLTRSDKNRGKSDNVPSEEVVKKMKNYWRQLLNAKLITQRKFDNLTKAERGGLSELDKAGFIKRQLVETRQITKHVAQILDSRMNTKYDENDKLIREVKVITLKSKLVSDFRKDFQFYKVREINNYHHAHDAYLNAVVGTALIKKYPKLESEFVYGDYKVYDVRKMIAKSEQEIGKATAKYFFYSNIMNFFKTEITLANGEIRKRPLIETNGETGEIVWDKGRDFATVRKVLSMPQVNIVKKTEVQTGGFSKESILPKRNSDKLIARKKDWDPKKYGGFDSPTVAYSVLVVAKVEKGKSKKLKSVKELLGITIMERSSFEKNPIDFLEAKGYKEVKKDLIIKLPKYSLFELENGRKRMLASAGELQKGNELALPSKYVNFLYLASHYEKLKGSPEDNEQKQLFVEQHKHYLDEIIEQISEFSKRVILADANLDKVLSAYNKHRDKPIREQAENIIHLFTLTNLGAPAAFKYFDTTIDRKRYTSTKEVLDATLIHQSITGLYETRIDLSQLGGDPKKKRKVGGPSSGAPPPSGGSPAGSPTSTEEGTSESATPESGPGTSTEPSEGSAPGSPAGSPTSTEEGTSTEPSEGSAPGTSTEPSETGSGGGSPQSYEELQTQRVMANVRERQRTQSLNEAFAALRKIIPTLPSDKLSKIQTLKLAARYIDFLYQVLQSDELDSKMAS

SEQ ID NO: 1053 - protein, 1547 aa, synthetic construct
  REGION 1..1547: note = Description of Artificial Sequence: Synthetic polypeptide
MGTPKKKRKVMDKKYSIGLAIGTNSVGWAVITDEYKVPSKKFKVLGNTDRHSIKKNLIGALLFDSGETAEATRLKRTARRRYTRRKNRICYLQEIFSNEMAKVDDSFFHRLEESFLVEEDKKHERHPIFGNIVDEVAYHEKYPTIYHLRKKLVDSTDKADLRLIYLALAHMIKFRGHFLIEGDLNPDNSDVDKLFIQLVQTYNQLFEENPINASGVDAKAILSARLSKSRRLENLIAQLPGEKKNGLFGNLIALSLGLTPNFKSNFDLAEDAKLQLSKDTYDDDLDNLLAQIGDQYADLFLAAKNLSDAILLSDILRVNTEITKAPLSASMIKRYDEHHQDLTLLKALVRQQLPEKYKEIFFDQSKNGYAGYIDGGASQEEFYKFIKPILEKMDGTEELLVKLNREDLLRKQRTFDNGSIPHQIHLGELHAILRRQEDFYPFLKDNREKIEKILTFRIPYYVGPLARGNSRFAWMTRKSEETITPWNFEEVVDKGASAQSFIERMTNFDKNLPNEKVLPKHSLLYEYFTVYNELTKVKYVTEGMRKPAFLSGEQKKAIVDLLFKTNRKVTVKQLKEDYFKKIECFDSVEISGVEDRFNASLGTYHDLLKIIKDKDFLDNEENEDILEDIVLTLTLFEDREMIEERLKTYAHLFDDKVMKQLKRRRYTGWGRLSRKLINGIRDKQSGKTILDFLKSDGFANRNFMQLIHDDSLTFKEDIQKAQVSGQGDSLHEHIANLAGSPAIKKGILQTVKVVDELVKVMGRHKPENIVIEMARENQTTQKGQKNSRERMKRIEEGIKELGSQILKEHPVENTQLQNEKLYLYYLQNGRDMYVDQELDINRLSDYDVDAIVPQSFLKDDSIDNKVLTRSDKNRGKSDNVPSEEVVKKMKNYWRQLLNAKLITQRKFDNLTKAERGGLSELDKAGFIKRQLVETRQITKHVAQILDSRMNTKYDENDKLIREVKVITLKSKLVSDFRKDFQFYKVREINNYHHAHDAYLNAVVGTALIKKYPKLESEFVYGDYKVYDVRKMIAKSEQEIGKATAKYFFYSNIMNFFKTEITLANGEIRKRPLIETNGETGEIVWDKGRDFATVRKVLSMPQVNIVKKTEVQTGGFSKESILPKRNSDKLIARKKDWDPKKYGGFDSPTVAYSVLVVAKVEKGKSKKLKSVKELLGITIMERSSFEKNPIDFLEAKGYKEVKKDLIIKLPKYSLFELENGRKRMLASAGELQKGNELALPSKYVNFLYLASHYEKLKGSPEDNEQKQLFVEQHKHYLDEIIEQISEFSKRVILADANLDKVLSAYNKHRDKPIREQAENIIHLFTLTNLGAPAAFKYFDTTIDRKRYTSTKEVLDATLIHQSITGLYETRIDLSQLGGDPKKKRKVGGPSSGAPPPSGGSPAGSPTSTEEGTSESATPESGPGTSTEPSEGSAPGSPAGSPTSTEEGTSTEPSEGSAPGTSTEPSETGIAPGVVMASSPALPTQPAEEAARKREVRLMKNREAARECRRKKKEYVKCLENRVAVLENQNKTLIEELKALKDLYCHKSD

SEQ ID NO: 1054 - protein, 1547 aa, synthetic construct
  REGION 1..1547: note = Description of Artificial Sequence: Synthetic polypeptide
MGTPKKKRKVMDKKYSIGLAIGTNSVGWAVITDEYKVPSKKFKVLGNTDRHSIKKNLIGALLFDSGETAEATRLKRTARRRYTRRKNRICYLQEIFSNEMAKVDDSFFHRLEESFLVEEDKKHERHPIFGNIVDEVAYHEKYPTIYHLRKKLVDSTDKADLRLIYLALAHMIKFRGHFLIEGDLNPDNSDVDKLFIQLVQTYNQLFEENPINASGVDAKAILSARLSKSRRLENLIAQLPGEKKNGLFGNLIALSLGLTPNFKSNFDLAEDAKLQLSKDTYDDDLDNLLAQIGDQYADLFLAAKNLSDAILLSDILRVNTEITKAPLSASMIKRYDEHHQDLTLLKALVRQQLPEKYKEIFFDQSKNGYAGYIDGGASQEEFYKFIKPILEKMDGTEELLVKLNREDLLRKQRTFDNGSIPHQIHLGELHAILRRQEDFYPFLKDNREKIEKILTFRIPYYVGPLARGNSRFAWMTRKSEETITPWNFEEVVDKGASAQSFIERMTNFDKNLPNEKVLPKHSLLYEYFTVYNELTKVKYVTEGMRKPAFLSGEQKKAIVDLLFKTNRKVTVKQLKEDYFKKIECFDSVEISGVEDRFNASLGTYHDLLKIIKDKDFLDNEENEDILEDIVLTLTLFEDREMIEERLKTYAHLFDDKVMKQLKRRRYTGWGRLSRKLINGIRDKQSGKTILDFLKSDGFANRNFMQLIHDDSLTFKEDIQKAQVSGQGDSLHEHIANLAGSPAIKKGILQTVKVVDELVKVMGRHKPENIVIEMARENQTTQKGQKNSRERMKRIEEGIKELGSQILKEHPVENTQLQNEKLYLYYLQNGRDMYVDQELDINRLSDYDVDAIVPQSFLKDDSIDNKVLTRSDKNRGKSDNVPSEEVVKKMKNYWRQLLNAKLITQRKFDNLTKAERGGLSELDKAGFIKRQLVETRQITKHVAQILDSRMNTKYDENDKLIREVKVITLKSKLVSDFRKDFQFYKVREINNYHHAHDAYLNAVVGTALIKKYPKLESEFVYGDYKVYDVRKMIAKSEQEIGKATAKYFFYSNIMNFFKTEITLANGEIRKRPLIETNGETGEIVWDKGRDFATVRKVLSMPQVNIVKKTEVQTGGFSKESILPKRNSDKLIARKKDWDPKKYGGFDSPTVAYSVLVVAKVEKGKSKKLKSVKELLGITIMERSSFEKNPIDFLEAKGYKEVKKDLIIKLPKYSLFELENGRKRMLASAGELQKGNELALPSKYVNFLYLASHYEKLKGSPEDNEQKQLFVEQHKHYLDEIIEQISEFSKRVILADANLDKVLSAYNKHRDKPIREQAENIIHLFTLTNLGAPAAFKYFDTTIDRKRYTSTKEVLDATLIHQSITGLYETRIDLSQLGGDPKKKRKVGGPSSGAPPPSGGSPAGSPTSTEEGTSESATPESGPGTSTEPSEGSAPGSPAGSPTSTEEGTSTEPSEGSAPGTSTEPSETGSRIPVSKSQPVTPEKHRARKRQAWLWEEDKNLRSGVRKYGEGNWSKILLHYKFNNRTSVMLKDRWRTMKKLKLISSDSED

SEQ ID NO: 1055 - protein, 1547 aa, synthetic construct
  REGION 1..1547: note = Description of Artificial Sequence: Synthetic polypeptide
MGTPKKKRKVMDKKYSIGLAIGTNSVGWAVITDEYKVPSKKFKVLGNTDRHSIKKNLIGALLFDSGETAEATRLKRTARRRYTRRKNRICYLQEIFSNEMAKVDDSFFHRLEESFLVEEDKKHERHPIFGNIVDEVAYHEKYPTIYHLRKKLVDSTDKADLRLIYLALAHMIKFRGHFLIEGDLNPDNSDVDKLFIQLVQTYNQLFEENPINASGVDAKAILSARLSKSRRLENLIAQLPGEKKNGLFGNLIALSLGLTPNFKSNFDLAEDAKLQLSKDTYDDDLDNLLAQIGDQYADLFLAAKNLSDAILLSDILRVNTEITKAPLSASMIKRYDEHHQDLTLLKALVRQQLPEKYKEIFFDQSKNGYAGYIDGGASQEEFYKFIKPILEKMDGTEELLVKLNREDLLRKQRTFDNGSIPHQIHLGELHAILRRQEDFYPFLKDNREKIEKILTFRIPYYVGPLARGNSRFAWMTRKSEETITPWNFEEVVDKGASAQSFIERMTNFDKNLPNEKVLPKHSLLYEYFTVYNELTKVKYVTEGMRKPAFLSGEQKKAIVDLLFKTNRKVTVKQLKEDYFKKIECFDSVEISGVEDRFNASLGTYHDLLKIIKDKDFLDNEENEDILEDIVLTLTLFEDREMIEERLKTYAHLFDDKVMKQLKRRRYTGWGRLSRKLINGIRDKQSGKTILDFLKSDGFANRNFMQLIHDDSLTFKEDIQKAQVSGQGDSLHEHIANLAGSPAIKKGILQTVKVVDELVKVMGRHKPENIVIEMARENQTTQKGQKNSRERMKRIEEGIKELGSQILKEHPVENTQLQNEKLYLYYLQNGRDMYVDQELDINRLSDYDVDAIVPQSFLKDDSIDNKVLTRSDKNRGKSDNVPSEEVVKKMKNYWRQLLNAKLITQRKFDNLTKAERGGLSELDKAGFIKRQLVETRQITKHVAQILDSRMNTKYDENDKLIREVKVITLKSKLVSDFRKDFQFYKVREINNYHHAHDAYLNAVVGTALIKKYPKLESEFVYGDYKVYDVRKMIAKSEQEIGKATAKYFFYSNIMNFFKTEITLANGEIRKRPLIETNGETGEIVWDKGRDFATVRKVLSMPQVNIVKKTEVQTGGFSKESILPKRNSDKLIARKKDWDPKKYGGFDSPTVAYSVLVVAKVEKGKSKKLKSVKELLGITIMERSSFEKNPIDFLEAKGYKEVKKDLIIKLPKYSLFELENGRKRMLASAGELQKGNELALPSKYVNFLYLASHYEKLKGSPEDNEQKQLFVEQHKHYLDEIIEQISEFSKRVILADANLDKVLSAYNKHRDKPIREQAENIIHLFTLTNLGAPAAFKYFDTTIDRKRYTSTKEVLDATLIHQSITGLYETRIDLSQLGGDPKKKRKVGGPSSGAPPPSGGSPAGSPTSTEEGTSESATPESGPGTSTEPSEGSAPGSPAGSPTSTEEGTSTEPSEGSAPGTSTEPSETGSLAIARGRGKGPAAEEPLSLLDDMNHCYSRLRELVPGVPRGTQLSQVEILQRVIDYILDLQVVLAEPAPGPPDGPHLPIQ

SEQ ID NO: 1056 - protein, 1547 aa, synthetic construct
  REGION 1..1547: note = Description of Artificial Sequence: Synthetic polypeptide
MGTPKKKRKVMDKKYSIGLAIGTNSVGWAVITDEYKVPSKKFKVLGNTDRHSIKKNLIGALLFDSGETAEATRLKRTARRRYTRRKNRICYLQEIFSNEMAKVDDSFFHRLEESFLVEEDKKHERHPIFGNIVDEVAYHEKYPTIYHLRKKLVDSTDKADLRLIYLALAHMIKFRGHFLIEGDLNPDNSDVDKLFIQLVQTYNQLFEENPINASGVDAKAILSARLSKSRRLENLIAQLPGEKKNGLFGNLIALSLGLTPNFKSNFDLAEDAKLQLSKDTYDDDLDNLLAQIGDQYADLFLAAKNLSDAILLSDILRVNTEITKAPLSASMIKRYDEHHQDLTLLKALVRQQLPEKYKEIFFDQSKNGYAGYIDGGASQEEFYKFIKPILEKMDGTEELLVKLNREDLLRKQRTFDNGSIPHQIHLGELHAILRRQEDFYPFLKDNREKIEKILTFRIPYYVGPLARGNSRFAWMTRKSEETITPWNFEEVVDKGASAQSFIERMTNFDKNLPNEKVLPKHSLLYEYFTVYNELTKVKYVTEGMRKPAFLSGEQKKAIVDLLFKTNRKVTVKQLKEDYFKKIECFDSVEISGVEDRFNASLGTYHDLLKIIKDKDFLDNEENEDILEDIVLTLTLFEDREMIEERLKTYAHLFDDKVMKQLKRRRYTGWGRLSRKLINGIRDKQSGKTILDFLKSDGFANRNFMQLIHDDSLTFKEDIQKAQVSGQGDSLHEHIANLAGSPAIKKGILQTVKVVDELVKVMGRHKPENIVIEMARENQTTQKGQKNSRERMKRIEEGIKELGSQILKEHPVENTQLQNEKLYLYYLQNGRDMYVDQELDINRLSDYDVDAIVPQSFLKDDSIDNKVLTRSDKNRGKSDNVPSEEVVKKMKNYWRQLLNAKLITQRKFDNLTKAERGGLSELDKAGFIKRQLVETRQITKHVAQILDSRMNTKYDENDKLIREVKVITLKSKLVSDFRKDFQFYKVREINNYHHAHDAYLNAVVGTALIKKYPKLESEFVYGDYKVYDVRKMIAKSEQEIGKATAKYFFYSNIMNFFKTEITLANGEIRKRPLIETNGETGEIVWDKGRDFATVRKVLSMPQVNIVKKTEVQTGGFSKESILPKRNSDKLIARKKDWDPKKYGGFDSPTVAYSVLVVAKVEKGKSKKLKSVKELLGITIMERSSFEKNPIDFLEAKGYKEVKKDLIIKLPKYSLFELENGRKRMLASAGELQKGNELALPSKYVNFLYLASHYEKLKGSPEDNEQKQLFVEQHKHYLDEIIEQISEFSKRVILADANLDKVLSAYNKHRDKPIREQAENIIHLFTLTNLGAPAAFKYFDTTIDRKRYTSTKEVLDATLIHQSITGLYETRIDLSQLGGDPKKKRKVGGPSSGAPPPSGGSPAGSPTSTEEGTSESATPESGPGTSTEPSEGSAPGSPAGSPTSTEEGTSTEPSEGSAPGTSTEPSETGGSGPPSSGGGLYRDMGAQGGRPSLIARIPVARILGDPEEESWSPSLTNLEKVVVTDVTSNFLTVTIKESNTDQGFFKEKR

SEQ ID NO: 1057 - protein, 1547 aa, synthetic construct
  REGION 1..1547: note = Description of Artificial Sequence: Synthetic polypeptide
MGTPKKKRKVMDKKYSIGLAIGTNSVGWAVITDEYKVPSKKFKVLGNTDRHSIKKNLIGALLFDSGETAEATRLKRTARRRYTRRKNRICYLQEIFSNEMAKVDDSFFHRLEESFLVEEDKKHERHPIFGNIVDEVAYHEKYPTIYHLRKKLVDSTDKADLRLIYLALAHMIKFRGHFLIEGDLNPDNSDVDKLFIQLVQTYNQLFEENPINASGVDAKAILSARLSKSRRLENLIAQLPGEKKNGLFGNLIALSLGLTPNFKSNFDLAEDAKLQLSKDTYDDDLDNLLAQIGDQYADLFLAAKNLSDAILLSDILRVNTEITKAPLSASMIKRYDEHHQDLTLLKALVRQQLPEKYKEIFFDQSKNGYAGYIDGGASQEEFYKFIKPILEKMDGTEELLVKLNREDLLRKQRTFDNGSIPHQIHLGELHAILRRQEDFYPFLKDNREKIEKILTFRIPYYVGPLARGNSRFAWMTRKSEETITPWNFEEVVDKGASAQSFIERMTNFDKNLPNEKVLPKHSLLYEYFTVYNELTKVKYVTEGMRKPAFLSGEQKKAIVDLLFKTNRKVTVKQLKEDYFKKIECFDSVEISGVEDRFNASLGTYHDLLKIIKDKDFLDNEENEDILEDIVLTLTLFEDREMIEERLKTYAHLFDDKVMKQLKRRRYTGWGRLSRKLINGIRDKQSGKTILDFLKSDGFANRNFMQLIHDDSLTFKEDIQKAQVSGQGDSLHEHIANLAGSPAIKKGILQTVKVVDELVKVMGRHKPENIVIEMARENQTTQKGQKNSRERMKRIEEGIKELGSQILKEHPVENTQLQNEKLYLYYLQNGRDMYVDQELDINRLSDYDVDAIVPQSFLKDDSIDNKVLTRSDKNRGKSDNVPSEEVVKKMKNYWRQLLNAKLITQRKFDNLTKAERGGLSELDKAGFIKRQLVETRQITKHVAQILDSRMNTKYDENDKLIREVKVITLKSKLVSDFRKDFQFYKVREINNYHHAHDAYLNAVVGTALIKKYPKLESEFVYGDYKVYDVRKMIAKSEQEIGKATAKYFFYSNIMNFFKTEITLANGEIRKRPLIETNGETGEIVWDKGRDFATVRKVLSMPQVNIVKKTEVQTGGFSKESILPKRNSDKLIARKKDWDPKKYGGFDSPTVAYSVLVVAKVEKGKSKKLKSVKELLGITIMERSSFEKNPIDFLEAKGYKEVKKDLIIKLPKYSLFELENGRKRMLASAGELQKGNELALPSKYVNFLYLASHYEKLKGSPEDNEQKQLFVEQHKHYLDEIIEQISEFSKRVILADANLDKVLSAYNKHRDKPIREQAENIIHLFTLTNLGAPAAFKYFDTTIDRKRYTSTKEVLDATLIHQSITGLYETRIDLSQLGGDPKKKRKVGGPSSGAPPPSGGSPAGSPTSTEEGTSESATPESGPGTSTEPSEGSAPGSPAGSPTSTEEGTSTEPSEGSAPGTSTEPSETGELPAVGEHVFAVESIEKKRIRKGRVEYLVKWRGWSPKYNTWEPEENILDPRLLIAFQNRERQEQLMGYRKRGPKPKPLVV

SEQ ID NO: 1058 - protein, 1547 aa, synthetic construct
  REGION 1..1547: note = Description of Artificial Sequence: Synthetic polypeptide
MGTPKKKRKVMDKKYSIGLAIGTNSVGWAVITDEYKVPSKKFKVLGNTDRHSIKKNLIGALLFDSGETAEATRLKRTARRRYTRRKNRICYLQEIFSNEMAKVDDSFFHRLEESFLVEEDKKHERHPIFGNIVDEVAYHEKYPTIYHLRKKLVDSTDKADLRLIYLALAHMIKFRGHFLIEGDLNPDNSDVDKLFIQLVQTYNQLFEENPINASGVDAKAILSARLSKSRRLENLIAQLPGEKKNGLFGNLIALSLGLTPNFKSNFDLAEDAKLQLSKDTYDDDLDNLLAQIGDQYADLFLAAKNLSDAILLSDILRVNTEITKAPLSASMIKRYDEHHQDLTLLKALVRQQLPEKYKEIFFDQSKNGYAGYIDGGASQEEFYKFIKPILEKMDGTEELLVKLNREDLLRKQRTFDNGSIPHQIHLGELHAILRRQEDFYPFLKDNREKIEKILTFRIPYYVGPLARGNSRFAWMTRKSEETITPWNFEEVVDKGASAQSFIERMTNFDKNLPNEKVLPKHSLLYEYFTVYNELTKVKYVTEGMRKPAFLSGEQKKAIVDLLFKTNRKVTVKQLKEDYFKKIECFDSVEISGVEDRFNASLGTYHDLLKIIKDKDFLDNEENEDILEDIVLTLTLFEDREMIEERLKTYAHLFDDKVMKQLKRRRYTGWGRLSRKLINGIRDKQSGKTILDFLKSDGFANRNFMQLIHDDSLTFKEDIQKAQVSGQGDSLHEHIANLAGSPAIKKGILQTVKVVDELVKVMGRHKPENIVIEMARENQTTQKGQKNSRERMKRIEEGIKELGSQILKEHPVENTQLQNEKLYLYYLQNGRDMYVDQELDINRLSDYDVDAIVPQSFLKDDSIDNKVLTRSDKNRGKSDNVPSEEVVKKMKNYWRQLLNAKLITQRKFDNLTKAERGGLSELDKAGFIKRQLVETRQITKHVAQILDSRMNTKYDENDKLIREVKVITLKSKLVSDFRKDFQFYKVREINNYHHAHDAYLNAVVGTALIKKYPKLESEFVYGDYKVYDVRKMIAKSEQEIGKATAKYFFYSNIMNFFKTEITLANGEIRKRPLIETNGETGEIVWDKGRDFATVRKVLSMPQVNIVKKTEVQTGGFSKESILPKRNSDKLIARKKDWDPKKYGGFDSPTVAYSVLVVAKVEKGKSKKLKSVKELLGITIMERSSFEKNPIDFLEAKGYKEVKKDLIIKLPKYSLFELENGRKRMLASAGELQKGNELALPSKYVNFLYLASHYEKLKGSPEDNEQKQLFVEQHKHYLDEIIEQISEFSKRVILADANLDKVLSAYNKHRDKPIREQAENIIHLFTLTNLGAPAAFKYFDTTIDRKRYTSTKEVLDATLIHQSITGLYETRIDLSQLGGDPKKKRKVGGPSSGAPPPSGGSPAGSPTSTEEGTSESATPESGPGTSTEPSEGSAPGSPAGSPTSTEEGTSTEPSEGSAPGTSTEPSETGVDSSSNQLPSSKRMRTAFTSTQLLELEREFASNMYLSRLRRIEIATYLNLSEKQVKIWFQNRRVKHKKEGKGSNHRGGGG

SEQ ID NO: 1059 - protein, 1547 aa, synthetic construct
  REGION 1..1547: note = Description of Artificial Sequence: Synthetic polypeptide
MGTPKKKRKVMDKKYSIGLAIGTNSVGWAVITDEYKVPSKKFKVLGNTDRHSIKKNLIGALLFDSGETAEATRLKRTARRRYTRRKNRICYLQEIFSNEMAKVDDSFFHRLEESFLVEEDKKHERHPIFGNIVDEVAYHEKYPTIYHLRKKLVDSTDKADLRLIYLALAHMIKFRGHFLIEGDLNPDNSDVDKLFIQLVQTYNQLFEENPINASGVDAKAILSARLSKSRRLENLIAQLPGEKKNGLFGNLIALSLGLTPNFKSNFDLAEDAKLQLSKDTYDDDLDNLLAQIGDQYADLFLAAKNLSDAILLSDILRVNTEITKAPLSASMIKRYDEHHQDLTLLKALVRQQLPEKYKEIFFDQSKNGYAGYIDGGASQEEFYKFIKPILEKMDGTEELLVKLNREDLLRKQRTFDNGSIPHQIHLGELHAILRRQEDFYPFLKDNREKIEKILTFRIPYYVGPLARGNSRFAWMTRKSEETITPWNFEEVVDKGASAQSFIERMTNFDKNLPNEKVLPKHSLLYEYFTVYNELTKVKYVTEGMRKPAFLSGEQKKAIVDLLFKTNRKVTVKQLKEDYFKKIECFDSVEISGVEDRFNASLGTYHDLLKIIKDKDFLDNEENEDILEDIVLTLTLFEDREMIEERLKTYAHLFDDKVMKQLKRRRYTGWGRLSRKLINGIRDKQSGKTILDFLKSDGFANRNFMQLIHDDSLTFKEDIQKAQVSGQGDSLHEHIANLAGSPAIKKGILQTVKVVDELVKVMGRHKPENIVIEMARENQTTQKGQKNSRERMKRIEEGIKELGSQILKEHPVENTQLQNEKLYLYYLQNGRDMYVDQELDINRLSDYDVDAIVPQSFLKDDSIDNKVLTRSDKNRGKSDNVPSEEVVKKMKNYWRQLLNAKLITQRKFDNLTKAERGGLSELDKAGFIKRQLVETRQITKHVAQILDSRMNTKYDENDKLIREVKVITLKSKLVSDFRKDFQFYKVREINNYHHAHDAYLNAVVGTALIKKYPKLESEFVYGDYKVYDVRKMIAKSEQEIGKATAKYFFYSNIMNFFKTEITLANGEIRKRPLIETNGETGEIVWDKGRDFATVRKVLSMPQVNIVKKTEVQTGGFSKESILPKRNSDKLIARKKDWDPKKYGGFDSPTVAYSVLVVAKVEKGKSKKLKSVKELLGITIMERSSFEKNPIDFLEAKGYKEVKKDLIIKLPKYSLFELENGRKRMLASAGELQKGNELALPSKYVNFLYLASHYEKLKGSPEDNEQKQLFVEQHKHYLDEIIEQISEFSKRVILADANLDKVLSAYNKHRDKPIREQAENIIHLFTLTNLGAPAAFKYFDTTIDRKRYTSTKEVLDATLIHQSITGLYETRIDLSQLGGDPKKKRKVGGPSSGAPPPSGGSPAGSPTSTEEGTSESATPESGPGTSTEPSEGSAPGSPAGSPTSTEEGTSTEPSEGSAPGTSTEPSETGTPGGGGDAGKKRKRRVLFSKAQTYELERRFRQQRYLSAPEREHLASLIRLTPTQVKIWFQNHRYKMKRARAEKGMEVTPL

SEQ ID NO: 1060 - protein, 1547 aa, synthetic construct
  REGION 1..1547: note = Description of Artificial Sequence: Synthetic polypeptide
MGTPKKKRKVMDKKYSIGLAIGTNSVGWAVITDEYKVPSKKFKVLGNTDRHSIKKNLIGALLFDSGETAEATRLKRTARRRYTRRKNRICYLQEIFSNEMAKVDDSFFHRLEESFLVEEDKKHERHPIFGNIVDEVAYHEKYPTIYHLRKKLVDSTDKADLRLIYLALAHMIKFRGHFLIEGDLNPDNSDVDKLFIQLVQTYNQLFEENPINASGVDAKAILSARLSKSRRLENLIAQLPGEKKNGLFGNLIALSLGLTPNFKSNFDLAEDAKLQLSKDTYDDDLDNLLAQIGDQYADLFLAAKNLSDAILLSDILRVNTEITKAPLSASMIKRYDEHHQDLTLLKALVRQQLPEKYKEIFFDQSKNGYAGYIDGGASQEEFYKFIKPILEKMDGTEELLVKLNREDLLRKQRTFDNGSIPHQIHLGELHAILRRQEDFYPFLKDNREKIEKILTFRIPYYVGPLARGNSRFAWMTRKSEETITPWNFEEVVDKGASAQSFIERMTNFDKNLPNEKVLPKHSLLYEYFTVYNELTKVKYVTEGMRKPAFLSGEQKKAIVDLLFKTNRKVTVKQLKEDYFKKIECFDSVEISGVEDRFNASLGTYHDLLKIIKDKDFLDNEENEDILEDIVLTLTLFEDREMIEERLKTYAHLFDDKVMKQLKRRRYTGWGRLSRKLINGIRDKQSGKTILDFLKSDGFANRNFMQLIHDDSLTFKEDIQKAQVSGQGDSLHEHIANLAGSPAIKKGILQTVKVVDELVKVMGRHKPENIVIEMARENQTTQKGQKNSRERMKRIEEGIKELGSQILKEHPVENTQLQNEKLYLYYLQNGRDMYVDQELDINRLSDYDVDAIVPQSFLKDDSIDNKVLTRSDKNRGKSDNVPSEEVVKKMKNYWRQLLNAKLITQRKFDNLTKAERGGLSELDKAGFIKRQLVETRQITKHVAQILDSRMNTKYDENDKLIREVKVITLKSKLVSDFRKDFQFYKVREINNYHHAHDAYLNAVVGTALIKKYPKLESEFVYGDYKVYDVRKMIAKSEQEIGKATAKYFFYSNIMNFFKTEITLANGEIRKRPLIETNGETGEIVWDKGRDFATVRKVLSMPQVNIVKKTEVQTGGFSKESILPKRNSDKLIARKKDWDPKKYGGFDSPTVAYSVLVVAKVEKGKSKKLKSVKELLGITIMERSSFEKNPIDFLEAKGYKEVKKDLIIKLPKYSLFELENGRKRMLASAGELQKGNELALPSKYVNFLYLASHYEKLKGSPEDNEQKQLFVEQHKHYLDEIIEQISEFSKRVILADANLDKVLSAYNKHRDKPIREQAENIIHLFTLTNLGAPAAFKYFDTTIDRKRYTSTKEVLDATLIHQSITGLYETRIDLSQLGGDPKKKRKVGGPSSGAPPPSGGSPAGSPTSTEEGTSESATPESGPGTSTEPSEGSAPGSPAGSPTSTEEGTSTEPSEGSAPGTSTEPSETGQTVVMTSPVTLTSQTTKTDDPQLKREIRLMKNREAARECRRKKKEYVKCLENRVAVLENQNKTLIEELKTLKDLYSNKSV

SEQ ID NO: 1061 - protein, 1547 aa, synthetic construct
  REGION 1..1547: note = Description of Artificial Sequence: Synthetic polypeptide
MGTPKKKRKVMDKKYSIGLAIGTNSVGWAVITDEYKVPSKKFKVLGNTDRHSIKKNLIGALLFDSGETAEATRLKRTARRRYTRRKNRICYLQEIFSNEMAKVDDSFFHRLEESFLVEEDKKHERHPIFGNIVDEVAYHEKYPTIYHLRKKLVDSTDKADLRLIYLALAHMIKFRGHFLIEGDLNPDNSDVDKLFIQLVQTYNQLFEENPINASGVDAKAILSARLSKSRRLENLIAQLPGEKKNGLFGNLIALSLGLTPNFKSNFDLAEDAKLQLSKDTYDDDLDNLLAQIGDQYADLFLAAKNLSDAILLSDILRVNTEITKAPLSASMIKRYDEHHQDLTLLKALVRQQLPEKYKEIFFDQSKNGYAGYIDGGASQEEFYKFIKPILEKMDGTEELLVKLNREDLLRKQRTFDNGSIPHQIHLGELHAILRRQEDFYPFLKDNREKIEKILTFRIPYYVGPLARGNSRFAWMTRKSEETITPWNFEEVVDKGASAQSFIERMTNFDKNLPNEKVLPKHSLLYEYFTVYNELTKVKYVTEGMRKPAFLSGEQKKAIVDLLFKTNRKVTVKQLKEDYFKKIECFDSVEISGVEDRFNASLGTYHDLLKIIKDKDFLDNEENEDILEDIVLTLTLFEDREMIEERLKTYAHLFDDKVMKQLKRRRYTGWGRLSRKLINGIRDKQSGKTILDFLKSDGFANRNFMQLIHDDSLTFKEDIQKAQVSGQGDSLHEHIANLAGSPAIKKGILQTVKVVDELVKVMGRHKPENIVIEMARENQTTQKGQKNSRERMKRIEEGIKELGSQILKEHPVENTQLQNEKLYLYYLQNGRDMYVDQELDINRLSDYDVDAIVPQSFLKDDSIDNKVLTRSDKNRGKSDNVPSEEVVKKMKNYWRQLLNAKLITQRKFDNLTKAERGGLSELDKAGFIKRQLVETRQITKHVAQILDSRMNTKYDENDKLIREVKVITLKSKLVSDFRKDFQFYKVREINNYHHAHDAYLNAVVGTALIKKYPKLESEFVYGDYKVYDVRKMIAKSEQEIGKATAKYFFYSNIMNFFKTEITLANGEIRKRPLIETNGETGEIVWDKGRDFATVRKVLSMPQVNIVKKTEVQTGGFSKESILPKRNSDKLIARKKDWDPKKYGGFDSPTVAYSVLVVAKVEKGKSKKLKSVKELLGITIMERSSFEKNPIDFLEAKGYKEVKKDLIIKLPKYSLFELENGRKRMLASAGELQKGNELALPSKYVNFLYLASHYEKLKGSPEDNEQKQLFVEQHKHYLDEIIEQISEFSKRVILADANLDKVLSAYNKHRDKPIREQAENIIHLFTLTNLGAPAAFKYFDTTIDRKRYTSTKEVLDATLIHQSITGLYETRIDLSQLGGDPKKKRKVGGPSSGAPPPSGGSPAGSPTSTEEGTSESATPESGPGTSTEPSEGSAPGSPAGSPTSTEEGTSTEPSEGSAPGTSTEPSETGKGSPSAQSFEELQSQRILANVRERQRTQSLNEAFAALRKIIPTLPSDKLSKIQTLKLAARYIDFLYQVLQSDEMDNKMTS

SEQ ID NO: 1062 - protein, 1547 aa, synthetic construct
  REGION 1..1547: note = Description of Artificial Sequence: Synthetic polypeptide
MGTPKKKRKVMDKKYSIGLAIGTNSVGWAVITDEYKVPSKKFKVLGNTDRHSIKKNLIGALLFDSGETAEATRLKRTARRRYTRRKNRICYLQEIFSNEMAKVDDSFFHRLEESFLVEEDKKHERHPIFGNIVDEVAYHEKYPTIYHLRKKLVDSTDKADLRLIYLALAHMIKFRGHFLIEGDLNPDNSDVDKLFIQLVQTYNQLFEENPINASGVDAKAILSARLSKSRRLENLIAQLPGEKKNGLFGNLIALSLGLTPNFKSNFDLAEDAKLQLSKDTYDDDLDNLLAQIGDQYADLFLAAKNLSDAILLSDILRVNTEITKAPLSASMIKRYDEHHQDLTLLKALVRQQLPEKYKEIFFDQSKNGYAGYIDGGASQEEFYKFIKPILEKMDGTEELLVKLNREDLLRKQRTFDNGSIPHQIHLGELHAILRRQEDFYPFLKDNREKIEKILTFRIPYYVGPLARGNSRFAWMTRKSEETITPWNFEEVVDKGASAQSFIERMTNFDKNLPNEKVLPKHSLLYEYFTVYNELTKVKYVTEGMRKPAFLSGEQKKAIVDLLFKTNRKVTVKQLKEDYFKKIECFDSVEISGVEDRFNASLGTYHDLLKIIKDKDFLDNEENEDILEDIVLTLTLFEDREMIEERLKTYAHLFDDKVMKQLKRRRYTGWGRLSRKLINGIRDKQSGKTILDFLKSDGFANRNFMQLIHDDSLTFKEDIQKAQVSGQGDSLHEHIANLAGSPAIKKGILQTVKVVDELVKVMGRHKPENIVIEMARENQTTQKGQKNSRERMKRIEEGIKELGSQILKEHPVENTQLQNEKLYLYYLQNGRDMYVDQELDINRLSDYDVDAIVPQSFLKDDSIDNKVLTRSDKNRGKSDNVPSEEVVKKMKNYWRQLLNAKLITQRKFDNLTKAERGGLSELDKAGFIKRQLVETRQITKHVAQILDSRMNTKYDENDKLIREVKVITLKSKLVSDFRKDFQFYKVREINNYHHAHDAYLNAVVGTALIKKYPKLESEFVYGDYKVYDVRKMIAKSEQEIGKATAKYFFYSNIMNFFKTEITLANGEIRKRPLIETNGETGEIVWDKGRDFATVRKVLSMPQVNIVKKTEVQTGGFSKESILPKRNSDKLIARKKDWDPKKYGGFDSPTVAYSVLVVAKVEKGKSKKLKSVKELLGITIMERSSFEKNPIDFLEAKGYKEVKKDLIIKLPKYSLFELENGRKRMLASAGELQKGNELALPSKYVNFLYLASHYEKLKGSPEDNEQKQLFVEQHKHYLDEIIEQISEFSKRVILADANLDKVLSAYNKHRDKPIREQAENIIHLFTLTNLGAPAAFKYFDTTIDRKRYTSTKEVLDATLIHQSITGLYETRIDLSQLGGDPKKKRKVGGPSSGAPPPSGGSPAGSPTSTEEGTSESATPESGPGTSTEPSEGSAPGSPAGSPTSTEEGTSTEPSEGSAPGTSTEPSETGKDPNEPQKPVSAYALFFRDTQAAIKGQNPNATFGEVSKIVASMWDSLGEEQKQVYKRKTEAAKKEYLKALAAYRASLVSK

SEQ ID NO: 1063 - protein, 1547 aa, synthetic construct
  REGION 1..1547: note = Description of Artificial Sequence: Synthetic polypeptide
MGTPKKKRKVMDKKYSIGLAIGTNSVGWAVITDEYKVPSKKFKVLGNTDRHSIKKNLIGALLFDSGETAEATRLKRTARRRYTRRKNRICYLQEIFSNEMAKVDDSFFHRLEESFLVEEDKKHERHPIFGNIVDEVAYHEKYPTIYHLRKKLVDSTDKADLRLIYLALAHMIKFRGHFLIEGDLNPDNSDVDKLFIQLVQTYNQLFEENPINASGVDAKAILSARLSKSRRLENLIAQLPGEKKNGLFGNLIALSLGLTPNFKSNFDLAEDAKLQLSKDTYDDDLDNLLAQIGDQYADLFLAAKNLSDAILLSDILRVNTEITKAPLSASMIKRYDEHHQDLTLLKALVRQQLPEKYKEIFFDQSKNGYAGYIDGGASQEEFYKFIKPILEKMDGTEELLVKLNREDLLRKQRTFDNGSIPHQIHLGELHAILRRQEDFYPFLKDNREKIEKILTFRIPYYVGPLARGNSRFAWMTRKSEETITPWNFEEVVDKGASAQSFIERMTNFDKNLPNEKVLPKHSLLYEYFTVYNELTKVKYVTEGMRKPAFLSGEQKKAIVDLLFKTNRKVTVKQLKEDYFKKIECFDSVEISGVEDRFNASLGTYHDLLKIIKDKDFLDNEENEDILEDIVLTLTLFEDREMIEERLKTYAHLFDDKVMKQLKRRRYTGWGRLSRKLINGIRDKQSGKTILDFLKSDGFANRNFMQLIHDDSLTFKEDIQKAQVSGQGDSLHEHIANLAGSPAIKKGILQTVKVVDELVKVMGRHKPENIVIEMARENQTTQKGQKNSRERMKRIEEGIKELGSQILKEHPVENTQLQNEKLYLYYLQNGRDMYVDQELDINRLSDYDVDAIVPQSFLKDDSIDNKVLTRSDKNRGKSDNVPSEEVVKKMKNYWRQLLNAKLITQRKFDNLTKAERGGLSELDKAGFIKRQLVETRQITKHVAQILDSRMNTKYDENDKLIREVKVITLKSKLVSDFRKDFQFYKVREINNYHHAHDAYLNAVVGTALIKKYPKLESEFVYGDYKVYDVRKMIAKSEQEIGKATAKYFFYSNIMNFFKTEITLANGEIRKRPLIETNGETGEIVWDKGRDFATVRKVLSMPQVNIVKKTEVQTGGFSKESILPKRNSDKLIARKKDWDPKKYGGFDSPTVAYSVLVVAKVEKGKSKKLKSVKELLGITIMERSSFEKNPIDFLEAKGYKEVKKDLIIKLPKYSLFELENGRKRMLASAGELQKGNELALPSKYVNFLYLASHYEKLKGSPEDNEQKQLFVEQHKHYLDEIIEQISEFSKRVILADANLDKVLSAYNKHRDKPIREQAENIIHLFTLTNLGAPAAFKYFDTTIDRKRYTSTKEVLDATLIHQSITGLYETRIDLSQLGGDPKKKRKVGGPSSGAPPPSGGSPAGSPTSTEEGTSESATPESGPGTSTEPSEGSAPGSPAGSPTSTEEGTSTEPSEGSAPGTSTEPSETGKDPNEPQKPVSAYALFFRDTQAAIKGQNPNATFGEVSKIVASMWDSLGEEQKQVYKRKTEAAKKEYLKALAAYKDNQECQ

SEQ ID NO: 1064 - protein, 1547 aa, synthetic construct
  REGION 1..1547: note = Description of Artificial Sequence: Synthetic polypeptide
MGTPKKKRKVMDKKYSIGLAIGTNSVGWAVITDEYKVPSKKFKVLGNTDRHSIKKNLIGALLFDSGETAEATRLKRTARRRYTRRKNRICYLQEIFSNEMAKVDDSFFHRLEESFLVEEDKKHERHPIFGNIVDEVAYHEKYPTIYHLRKKLVDSTDKADLRLIYLALAHMIKFRGHFLIEGDLNPDNSDVDKLFIQLVQTYNQLFEENPINASGVDAKAILSARLSKSRRLENLIAQLPGEKKNGLFGNLIALSLGLTPNFKSNFDLAEDAKLQLSKDTYDDDLDNLLAQIGDQYADLFLAAKNLSDAILLSDILRVNTEITKAPLSASMIKRYDEHHQDLTLLKALVRQQLPEKYKEIFFDQSKNGYAGYIDGGASQEEFYKFIKPILEKMDGTEELLVKLNREDLLRKQRTFDNGSIPHQIHLGELHAILRRQEDFYPFLKDNREKIEKILTFRIPYYVGPLARGNSRFAWMTRKSEETITPWNFEEVVDKGASAQSFIERMTNFDKNLPNEKVLPKHSLLYEYFTVYNELTKVKYVTEGMRKPAFLSGEQKKAIVDLLFKTNRKVTVKQLKEDYFKKIECFDSVEISGVEDRFNASLGTYHDLLKIIKDKDFLDNEENEDILEDIVLTLTLFEDREMIEERLKTYAHLFDDKVMKQLKRRRYTGWGRLSRKLINGIRDKQSGKTILDFLKSDGFANRNFMQLIHDDSLTFKEDIQKAQVSGQGDSLHEHIANLAGSPAIKKGILQTVKVVDELVKVMGRHKPENIVIEMARENQTTQKGQKNSRERMKRIEEGIKELGSQILKEHPVENTQLQNEKLYLYYLQNGRDMYVDQELDINRLSDYDVDAIVPQSFLKDDSIDNKVLTRSDKNRGKSDNVPSEEVVKKMKNYWRQLLNAKLITQRKFDNLTKAERGGLSELDKAGFIKRQLVETRQITKHVAQILDSRMNTKYDENDKLIREVKVITLKSKLVSDFRKDFQFYKVREINNYHHAHDAYLNAVVGTALIKKYPKLESEFVYGDYKVYDVRKMIAKSEQEIGKATAKYFFYSNIMNFFKTEITLANGEIRKRPLIETNGETGEIVWDKGRDFATVRKVLSMPQVNIVKKTEVQTGGFSKESILPKRNSDKLIARKKDWDPKKYGGFDSPTVAYSVLVVAKVEKGKSKKLKSVKELLGITIMERSSFEKNPIDFLEAKGYKEVKKDLIIKLPKYSLFELENGRKRMLASAGELQKGNELALPSKYVNFLYLASHYEKLKGSPEDNEQKQLFVEQHKHYLDEIIEQISEFSKRVILADANLDKVLSAYNKHRDKPIREQAENIIHLFTLTNLGAPAAFKYFDTTIDRKRYTSTKEVLDATLIHQSITGLYETRIDLSQLGGDPKKKRKVGGPSSGAPPPSGGSPAGSPTSTEEGTSESATPESGPGTSTEPSEGSAPGSPAGSPTSTEEGTSTEPSEGSAPGTSTEPSETGLDGSTWDFCSEDCKSKYLLWYCKAARCHACKRQGKLLETIHWRGQIRHFCNQQCLLRFYSQQNQPNLDTQSGPESLLNSQ

SEQ ID NO: 1065 - protein, 1547 aa, synthetic construct
  REGION 1..1547: note = Description of Artificial Sequence: Synthetic polypeptide
MGTPKKKRKVMDKKYSIGLAIGTNSVGWAVITDEYKVPSKKFKVLGNTDRHSIKKNLIGALLFDSGETAEATRLKRTARRRYTRRKNRICYLQEIFSNEMAKVDDSFFHRLEESFLVEEDKKHERHPIFGNIVDEVAYHEKYPTIYHLRKKLVDSTDKADLRLIYLALAHMIKFRGHFLIEGDLNPDNSDVDKLFIQLVQTYNQLFEENPINASGVDAKAILSARLSKSRRLENLIAQLPGEKKNGLFGNLIALSLGLTPNFKSNFDLAEDAKLQLSKDTYDDDLDNLLAQIGDQYADLFLAAKNLSDAILLSDILRVNTEITKAPLSASMIKRYDEHHQDLTLLKALVRQQLPEKYKEIFFDQSKNGYAGYIDGGASQEEFYKFIKPILEKMDGTEELLVKLNREDLLRKQRTFDNGSIPHQIHLGELHAILRRQEDFYPFLKDNREKIEKILTFRIPYYVGPLARGNSRFAWMTRKSEETITPWNFEEVVDKGASAQSFIERMTNFDKNLPNEKVLPKHSLLYEYFTVYNELTKVKYVTEGMRKPAFLSGEQKKAIVDLLFKTNRKVTVKQLKEDYFKKIECFDSVEISGVEDRFNASLGTYHDLLKIIKDKDFLDNEENEDILEDIVLTLTLFEDREMIEERLKTYAHLFDDKVMKQLKRRRYTGWGRLSRKLINGIRDKQSGKTILDFLKSDGFANRNFMQLIHDDSLTFKEDIQKAQVSGQGDSLHEHIANLAGSPAIKKGILQTVKVVDELVKVMGRHKPENIVIEMARENQTTQKGQKNSRERMKRIEEGIKELGSQILKEHPVENTQLQNEKLYLYYLQNGRDMYVDQELDINRLSDYDVDAIVPQSFLKDDSIDNKVLTRSDKNRGKSDNVPSEEVVKKMKNYWRQLLNAKLITQRKFDNLTKAERGGLSELDKAGFIKRQLVETRQITKHVAQILDSRMNTKYDENDKLIREVKVITLKSKLVSDFRKDFQFYKVREINNYHHAHDAYLNAVVGTALIKKYPKLESEFVYGDYKVYDVRKMIAKSEQEIGKATAKYFFYSNIMNFFKTEITLANGEIRKRPLIETNGETGEIVWDKGRDFATVRKVLSMPQVNIVKKTEVQTGGFSKESILPKRNSDKLIARKKDWDPKKYGGFDSPTVAYSVLVVAKVEKGKSKKLKSVKELLGITIMERSSFEKNPIDFLEAKGYKEVKKDLIIKLPKYSLFELENGRKRMLASAGELQKGNELALPSKYVNFLYLASHYEKLKGSPEDNEQKQLFVEQHKHYLDEIIEQISEFSKRVILADANLDKVLSAYNKHRDKPIREQAENIIHLFTLTNLGAPAAFKYFDTTIDRKRYTSTKEVLDATLIHQSITGLYETRIDLSQLGGDPKKKRKVGGPSSGAPPPSGGSPAGSPTSTEEGTSESATPESGPGTSTEPSEGSAPGSPAGSPTSTEEGTSTEPSEGSAPGTSTEPSETGASVQASRRQWCYLCDLPKMPWAMVWDFSEAVCRGCVNFEGADRIELLIDAARQLKRSHVLPEGRSPGPPALKHPATKDLA

SEQ ID NO: 1066 - protein, 1547 aa, synthetic construct
  REGION 1..1547: note = Description of Artificial Sequence: Synthetic polypeptide
MGTPKKKRKVMDKKYSIGLAIGTNSVGWAVITDEYKVPSKKFKVLGNTDRHSIKKNLIGALLFDSGETAEATRLKRTARRRYTRRKNRICYLQEIFSNEMAKVDDSFFHRLEESFLVEEDKKHERHPIFGNIVDEVAYHEKYPTIYHLRKKLVDSTDKADLRLIYLALAHMIKFRGHFLIEGDLNPDNSDVDKLFIQLVQTYNQLFEENPINASGVDAKAILSARLSKSRRLENLIAQLPGEKKNGLFGNLIALSLGLTPNFKSNFDLAEDAKLQLSKDTYDDDLDNLLAQIGDQYADLFLAAKNLSDAILLSDILRVNTEITKAPLSASMIKRYDEHHQDLTLLKALVRQQLPEKYKEIFFDQSKNGYAGYIDGGASQEEFYKFIKPILEKMDGTEELLVKLNREDLLRKQRTFDNGSIPHQIHLGELHAILRRQEDFYPFLKDNREKIEKILTFRIPYYVGPLARGNSRFAWMTRKSEETITPWNFEEVVDKGASAQSFIERMTNFDKNLPNEKVLPKHSLLYEYFTVYNELTKVKYVTEGMRKPAFLSGEQKKAIVDLLFKTNRKVTVKQLKEDYFKKIECFDSVEISGVEDRFNASLGTYHDLLKIIKDKDFLDNEENEDILEDIVLTLTLFEDREMIEERLKTYAHLFDDKVMKQLKRRRYTGWGRLSRKLINGIRDKQSGKTILDFLKSDGFANRNFMQLIHDDSLTFKEDIQKAQVSGQGDSLHEHIANLAGSPAIKKGILQTVKVVDELVKVMGRHKPENIVIEMARENQTTQKGQKNSRERMKRIEEGIKELGSQILKEHPVENTQLQNEKLYLYYLQNGRDMYVDQELDINRLSDYDVDAIVPQSFLKDDSIDNKVLTRSDKNRGKSDNVPSEEVVKKMKNYWRQLLNAKLITQRKFDNLTKAERGGLSELDKAGFIKRQLVETRQITKHVAQILDSRMNTKYDENDKLIREVKVITLKSKLVSDFRKDFQFYKVREINNYHHAHDAYLNAVVGTALIKKYPKLESEFVYGDYKVYDVRKMIAKSEQEIGKATAKYFFYSNIMNFFKTEITLANGEIRKRPLIETNGETGEIVWDKGRDFATVRKVLSMPQVNIVKKTEVQTGGFSKESILPKRNSDKLIARKKDWDPKKYGGFDSPTVAYSVLVVAKVEKGKSKKLKSVKELLGITIMERSSFEKNPIDFLEAKGYKEVKKDLIIKLPKYSLFELENGRKRMLASAGELQKGNELALPSKYVNFLYLASHYEKLKGSPEDNEQKQLFVEQHKHYLDEIIEQISEFSKRVILADANLDKVLSAYNKHRDKPIREQAENIIHLFTLTNLGAPAAFKYFDTTIDRKRYTSTKEVLDATLIHQSITGLYETRIDLSQLGGDPKKKRKVGGPSSGAPPPSGGSPAGSPTSTEEGTSESATPESGPGTSTEPSEGSAPGSPAGSPTSTEEGTSTEPSEGSAPGTSTEPSETGMEGPQPENMQPRTRRTKFTLLQVEELESVFRHTQYPDVPTRRELAENLGVTEDKVRVWFKNKRARCRRHQRELMLANELR

SEQ ID NO: 1067 - protein, 1547 aa, synthetic construct
  REGION 1..1547: note = Description of Artificial Sequence: Synthetic polypeptide
MGTPKKKRKVMDKKYSIGLAIGTNSVGWAVITDEYKVPSKKFKVLGNTDRHSIKKNLIGALLFDSGETAEATRLKRTARRRYTRRKNRICYLQEIFSNEMAKVDDSFFHRLEESFLVEEDKKHERHPIFGNIVDEVAYHEKYPTIYHLRKKLVDSTDKADLRLIYLALAHMIKFRGHFLIEGDLNPDNSDVDKLFIQLVQTYNQLFEENPINASGVDAKAILSARLSKSRRLENLIAQLPGEKKNGLFGNLIALSLGLTPNFKSNFDLAEDAKLQLSKDTYDDDLDNLLAQIGDQYADLFLAAKNLSDAILLSDILRVNTEITKAPLSASMIKRYDEHHQDLTLLKALVRQQLPEKYKEIFFDQSKNGYAGYIDGGASQEEFYKFIKPILEKMDGTEELLVKLNREDLLRKQRTFDNGSIPHQIHLGELHAILRRQEDFYPFLKDNREKIEKILTFRIPYYVGPLARGNSRFAWMTRKSEETITPWNFEEVVDKGASAQSFIERMTNFDKNLPNEKVLPKHSLLYEYFTVYNELTKVKYVTEGMRKPAFLSGEQKKAIVDLLFKTNRKVTVKQLKEDYFKKIECFDSVEISGVEDRFNASLGTYHDLLKIIKDKDFLDNEENEDILEDIVLTLTLFEDREMIEERLKTYAHLFDDKVMKQLKRRRYTGWGRLSRKLINGIRDKQSGKTILDFLKSDGFANRNFMQLIHDDSLTFKEDIQKAQVSGQGDSLHEHIANLAGSPAIKKGILQTVKVVDELVKVMGRHKPENIVIEMARENQTTQKGQKNSRERMKRIEEGIKELGSQILKEHPVENTQLQNEKLYLYYLQNGRDMYVDQELDINRLSDYDVDAIVPQSFLKDDSIDNKVLTRSDKNRGKSDNVPSEEVVKKMKNYWRQLLNAKLITQRKFDNLTKAERGGLSELDKAGFIKRQLVETRQITKHVAQILDSRMNTKYDENDKLIREVKVITLKSKLVSDFRKDFQFYKVREINNYHHAHDAYLNAVVGTALIKKYPKLESEFVYGDYKVYDVRKMIAKSEQEIGKATAKYFFYSNIMNFFKTEITLANGEIRKRPLIETNGETGEIVWDKGRDFATVRKVLSMPQVNIVKKTEVQTGGFSKESILPKRNSDKLIARKKDWDPKKYGGFDSPTVAYSVLVVAKVEKGKSKKLKSVKELLGITIMERSSFEKNPIDFLEAKGYKEVKKDLIIKLPKYSLFELENGRKRMLASAGELQKGNELALPSKYVNFLYLASHYEKLKGSPEDNEQKQLFVEQHKHYLDEIIEQISEFSKRVILADANLDKVLSAYNKHRDKPIREQAENIIHLFTLTNLGAPAAFKYFDTTIDRKRYTSTKEVLDATLIHQSITGLYETRIDLSQLGGDPKKKRKVGGPSSGAPPPSGGSPAGSPTSTEEGTSESATPESGPGTSTEPSEGSAPGSPAGSPTSTEEGTSTEPSEGSAPGTSTEPSETGPKIMPKKPAEEGNDSEEVPEASGPQNDGKELCPPGKPTTSEKIHERSGPKRGEHAWTHRLRERKQLVIYEEISDPEEDDE

SEQ ID NO: 1068 - protein, 1547 aa, synthetic construct
  REGION 1..1547: note = Description of Artificial Sequence: Synthetic polypeptide
MGTPKKKRKVMDKKYSIGLAIGTNSVGWAVITDEYKVPSKKFKVLGNTDRHSIKKNLIGALLFDSGETAEATRLKRTARRRYTRRKNRICYLQEIFSNEMAKVDDSFFHRLEESFLVEEDKKHERHPIFGNIVDEVAYHEKYPTIYHLRKKLVDSTDKADLRLIYLALAHMIKFRGHFLIEGDLNPDNSDVDKLFIQLVQTYNQLFEENPINASGVDAKAILSARLSKSRRLENLIAQLPGEKKNGLFGNLIALSLGLTPNFKSNFDLAEDAKLQLSKDTYDDDLDNLLAQIGDQYADLFLAAKNLSDAILLSDILRVNTEITKAPLSASMIKRYDEHHQDLTLLKALVRQQLPEKYKEIFFDQSKNGYAGYIDGGASQEEFYKFIKPILEKMDGTEELLVKLNREDLLRKQRTFDNGSIPHQIHLGELHAILRRQEDFYPFLKDNREKIEKILTFRIPYYVGPLARGNSRFAWMTRKSEETITPWNFEEVVDKGASAQSFIERMTNFDKNLPNEKVLPKHSLLYEYFTVYNELTKVKYVTEGMRKPAFLSGEQKKAIVDLLFKTNRKVTVKQLKEDYFKKIECFDSVEISGVEDRFNASLGTYHDLLKIIKDKDFLDNEENEDILEDIVLTLTLFEDREMIEERLKTYAHLFDDKVMKQLKRRRYTGWGRLSRKLINGIRDKQSGKTILDFLKSDGFANRNFMQLIHDDSLTFKEDIQKAQVSGQGDSLHEHIANLAGSPAIKKGILQTVKVVDELVKVMGRHKPENIVIEMARENQTTQKGQKNSRERMKRIEEGIKELGSQILKEHPVENTQLQNEKLYLYYLQNGRDMYVDQELDINRLSDYDVDAIVPQSFLKDDSIDNKVLTRSDKNRGKSDNVPSEEVVKKMKNYWRQLLNAKLITQRKFDNLTKAERGGLSELDKAGFIKRQLVETRQITKHVAQILDSRMNTKYDENDKLIREVKVITLKSKLVSDFRKDFQFYKVREINNYHHAHDAYLNAVVGTALIKKYPKLESEFVYGDYKVYDVRKMIAKSEQEIGKATAKYFFYSNIMNFFKTEITLANGEIRKRPLIETNGETGEIVWDKGRDFATVRKVLSMPQVNIVKKTEVQTGGFSKESILPKRNSDKLIARKKDWDPKKYGGFDSPTVAYSVLVVAKVEKGKSKKLKSVKELLGITIMERSSFEKNPIDFLEAKGYKEVKKDLIIKLPKYSLFELENGRKRMLASAGELQKGNELALPSKYVNFLYLASHYEKLKGSPEDNEQKQLFVEQHKHYLDEIIEQISEFSKRVILADANLDKVLSAYNKHRDKPIREQAENIIHLFTLTNLGAPAAFKYFDTTIDRKRYTSTKEVLDATLIHQSITGLYETRIDLSQLGGDPKKKRKVGGPSSGAPPPSGGSPAGSPTSTEEGTSESATPESGPGTSTEPSEGSAPGSPAGSPTSTEEGTSTEPSEGSAPGTSTEPSETGSAAQVSSSRRQSCYLCDLPRMPWAMIWDFSEPVCRGCVNYEGADRIEFVIETARQLKRAHGCFQDGRSPGPPPPVGVKTV

SEQ ID NO: 1069 - protein, 1547 aa, synthetic construct
  REGION 1..1547: note = Description of Artificial Sequence: Synthetic polypeptide
MGTPKKKRKVMDKKYSIGLAIGTNSVGWAVITDEYKVPSKKFKVLGNTDRHSIKKNLIGALLFDSGETAEATRLKRTARRRYTRRKNRICYLQEIFSNEMAKVDDSFFHRLEESFLVEEDKKHERHPIFGNIVDEVAYHEKYPTIYHLRKKLVDSTDKADLRLIYLALAHMIKFRGHFLIEGDLNPDNSDVDKLFIQLVQTYNQLFEENPINASGVDAKAILSARLSKSRRLENLIAQLPGEKKNGLFGNLIALSLGLTPNFKSNFDLAEDAKLQLSKDTYDDDLDNLLAQIGDQYADLFLAAKNLSDAILLSDILRVNTEITKAPLSASMIKRYDEHHQDLTLLKALVRQQLPEKYKEIFFDQSKNGYAGYIDGGASQEEFYKFIKPILEKMDGTEELLVKLNREDLLRKQRTFDNGSIPHQIHLGELHAILRRQEDFYPFLKDNREKIEKILTFRIPYYVGPLARGNSRFAWMTRKSEETITPWNFEEVVDKGASAQSFIERMTNFDKNLPNEKVLPKHSLLYEYFTVYNELTKVKYVTEGMRKPAFLSGEQKKAIVDLLFKTNRKVTVKQLKEDYFKKIECFDSVEISGVEDRFNASLGTYHDLLKIIKDKDFLDNEENEDILEDIVLTLTLFEDREMIEERLKTYAHLFDDKVMKQLKRRRYTGWGRLSRKLINGIRDKQSGKTILDFLKSDGFANRNFMQLIHDDSLTFKEDIQKAQVSGQGDSLHEHIANLAGSPAIKKGILQTVKVVDELVKVMGRHKPENIVIEMARENQTTQKGQKNSRERMKRIEEGIKELGSQILKEHPVENTQLQNEKLYLYYLQNGRDMYVDQELDINRLSDYDVDAIVPQSFLKDDSIDNKVLTRSDKNRGKSDNVPSEEVVKKMKNYWRQLLNAKLITQRKFDNLTKAERGGLSELDKAGFIKRQLVETRQITKHVAQILDSRMNTKYDENDKLIREVKVITLKSKLVSDFRKDFQFYKVREINNYHHAHDAYLNAVVGTALIKKYPKLESEFVYGDYKVYDVRKMIAKSEQEIGKATAKYFFYSNIMNFFKTEITLANGEIRKRPLIETNGETGEIVWDKGRDFATVRKVLSMPQVNIVKKTEVQTGGFSKESILPKRNSDKLIARKKDWDPKKYGGFDSPTVAYSVLVVAKVEKGKSKKLKSVKELLGITIMERSSFEKNPIDFLEAKGYKEVKKDLIIKLPKYSLFELENGRKRMLASAGELQKGNELALPSKYVNFLYLASHYEKLKGSPEDNEQKQLFVEQHKHYLDEIIEQISEFSKRVILADANLDKVLSAYNKHRDKPIREQAENIIHLFTLTNLGAPAAFKYFDTTIDRKRYTSTKEVLDATLIHQSITGLYETRIDLSQLGGDPKKKRKVGGPSSGAPPPSGGSPAGSPTSTEEGTSESATPESGPGTSTEPSEGSAPGSPAGSPTSTEEGTSTEPSEGSAPGTSTEPSETGNKKKVEEVLEEEEEEYVVEKVLDRRVVKGKVEYLLKWKGFSDEDNTWEPEENLDCPDLIAEFLQSQKTAHETDKSEGGKR

SEQ ID NO: 1070 - protein, 1547 aa, synthetic construct
  REGION 1..1547: note = Description of Artificial Sequence: Synthetic polypeptide
MGTPKKKRKVMDKKYSIGLAIGTNSVGWAVITDEYKVPSKKFKVLGNTDRHSIKKNLIGALLFDSGETAEATRLKRTARRRYTRRKNRICYLQEIFSNEMAKVDDSFFHRLEESFLVEEDKKHERHPIFGNIVDEVAYHEKYPTIYHLRKKLVDSTDKADLRLIYLALAHMIKFRGHFLIEGDLNPDNSDVDKLFIQLVQTYNQLFEENPINASGVDAKAILSARLSKSRRLENLIAQLPGEKKNGLFGNLIALSLGLTPNFKSNFDLAEDAKLQLSKDTYDDDLDNLLAQIGDQYADLFLAAKNLSDAILLSDILRVNTEITKAPLSASMIKRYDEHHQDLTLLKALVRQQLPEKYKEIFFDQSKNGYAGYIDGGASQEEFYKFIKPILEKMDGTEELLVKLNREDLLRKQRTFDNGSIPHQIHLGELHAILRRQEDFYPFLKDNREKIEKILTFRIPYYVGPLARGNSRFAWMTRKSEETITPWNFEEVVDKGASAQSFIERMTNFDKNLPNEKVLPKHSLLYEYFTVYNELTKVKYVTEGMRKPAFLSGEQKKAIVDLLFKTNRKVTVKQLKEDYFKKIECFDSVEISGVEDRFNASLGTYHDLLKIIKDKDFLDNEENEDILEDIVLTLTLFEDREMIEERLKTYAHLFDDKVMKQLKRRRYTGWGRLSRKLINGIRDKQSGKTILDFLKSDGFANRNFMQLIHDDSLTFKEDIQKAQVSGQGDSLHEHIANLAGSPAIKKGILQTVKVVDELVKVMGRHKPENIVIEMARENQTTQKGQKNSRERMKRIEEGIKELGSQILKEHPVENTQLQNEKLYLYYLQNGRDMYVDQELDINRLSDYDVDAIVPQSFLKDDSIDNKVLTRSDKNRGKSDNVPSEEVVKKMKNYWRQLLNAKLITQRKFDNLTKAERGGLSELDKAGFIKRQLVETRQITKHVAQILDSRMNTKYDENDKLIREVKVITLKSKLVSDFRKDFQFYKVREINNYHHAHDAYLNAVVGTALIKKYPKLESEFVYGDYKVYDVRKMIAKSEQEIGKATAKYFFYSNIMNFFKTEITLANGEIRKRPLIETNGETGEIVWDKGRDFATVRKVLSMPQVNIVKKTEVQTGGFSKESILPKRNSDKLIARKKDWDPKKYGGFDSPTVAYSVLVVAKVEKGKSKKLKSVKELLGITIMERSSFEKNPIDFLEAKGYKEVKKDLIIKLPKYSLFELENGRKRMLASAGELQKGNELALPSKYVNFLYLASHYEKLKGSPEDNEQKQLFVEQHKHYLDEIIEQISEFSKRVILADANLDKVLSAYNKHRDKPIREQAENIIHLFTLTNLGAPAAFKYFDTTIDRKRYTSTKEVLDATLIHQSITGLYETRIDLSQLGGDPKKKRKVGGPSSGAPPPSGGSPAGSPTSTEEGTSESATPESGPGTSTEPSEGSAPGSPAGSPTSTEEGTSTEPSEGSAPGTSTEPSETGLANVVEKVRLLRLHPGMGLKGDLCERHGEKLKMFCKEDVLIMCEACSQSPEHEAHSVVPMEDVAWEYKWELHEALEHLKK

SEQ ID NO: 1071 - protein, 1547 aa, synthetic construct
  REGION 1..1547: note = Description of Artificial Sequence: Synthetic polypeptide
MGTPKKKRKVMDKKYSIGLAIGTNSVGWAVITDEYKVPSKKFKVLGNTDRHSIKKNLIGALLFDSGETAEATRLKRTARRRYTRRKNRICYLQEIFSNEMAKVDDSFFHRLEESFLVEEDKKHERHPIFGNIVDEVAYHEKYPTIYHLRKKLVDSTDKADLRLIYLALAHMIKFRGHFLIEGDLNPDNSDVDKLFIQLVQTYNQLFEENPINASGVDAKAILSARLSKSRRLENLIAQLPGEKKNGLFGNLIALSLGLTPNFKSNFDLAEDAKLQLSKDTYDDDLDNLLAQIGDQYADLFLAAKNLSDAILLSDILRVNTEITKAPLSASMIKRYDEHHQDLTLLKALVRQQLPEKYKEIFFDQSKNGYAGYIDGGASQEEFYKFIKPILEKMDGTEELLVKLNREDLLRKQRTFDNGSIPHQIHLGELHAILRRQEDFYPFLKDNREKIEKILTFRIPYYVGPLARGNSRFAWMTRKSEETITPWNFEEVVDKGASAQSFIERMTNFDKNLPNEKVLPKHSLLYEYFTVYNELTKVKYVTEGMRKPAFLSGEQKKAIVDLLFKTNRKVTVKQLKEDYFKKIECFDSVEISGVEDRFNASLGTYHDLLKIIKDKDFLDNEENEDILEDIVLTLTLFEDREMIEERLKTYAHLFDDKVMKQLKRRRYTGWGRLSRKLINGIRDKQSGKTILDFLKSDGFANRNFMQLIHDDSLTFKEDIQKAQVSGQGDSLHEHIANLAGSPAIKKGILQTVKVVDELVKVMGRHKPENIVIEMARENQTTQKGQKNSRERMKRIEEGIKELGSQILKEHPVENTQLQNEKLYLYYLQNGRDMYVDQELDINRLSDYDVDAIVPQSFLKDDSIDNKVLTRSDKNRGKSDNVPSEEVVKKMKNYWRQLLNAKLITQRKFDNLTKAERGGLSELDKAGFIKRQLVETRQITKHVAQILDSRMNTKYDENDKLIREVKVITLKSKLVSDFRKDFQFYKVREINNYHHAHDAYLNAVVGTALIKKYPKLESEFVYGDYKVYDVRKMIAKSEQEIGKATAKYFFYSNIMNFFKTEITLANGEIRKRPLIETNGETGEIVWDKGRDFATVRKVLSMPQVNIVKKTEVQTGGFSKESILPKRNSDKLIARKKDWDPKKYGGFDSPTVAYSVLVVAKVEKGKSKKLKSVKELLGITIMERSSFEKNPIDFLEAKGYKEVKKDLIIKLPKYSLFELENGRKRMLASAGELQKGNELALPSKYVNFLYLASHYEKLKGSPEDNEQKQLFVEQHKHYLDEIIEQISEFSKRVILADANLDKVLSAYNKHRDKPIREQAENIIHLFTLTNLGAPAAFKYFDTTIDRKRYTSTKEVLDATLIHQSITGLYETRIDLSQLGGDPKKKRKVGGPSSGAPPPSGGSPAGSPTSTEEGTSESATPESGPGTSTEPSEGSAPGSPAGSPTSTEEGTSTEPSEGSAPGTSTEPSETGVVSHPSDASSYRRGRKKRVPYTKVQLKELEREYATNKFITKDKRRRISATTNLSERQVTIWFQNRRVKEKKVINKLKTTS

SEQ ID NO: 1072 - protein, 1547 aa, synthetic construct
  REGION 1..1547: note = Description of Artificial Sequence: Synthetic polypeptide
MGTPKKKRKVMDKKYSIGLAIGTNSVGWAVITDEYKVPSKKFKVLGNTDRHSIKKNLIGALLFDSGETAEATRLKRTARRRYTRRKNRICYLQEIFSNEMAKVDDSFFHRLEESFLVEEDKKHERHPIFGNIVDEVAYHEKYPTIYHLRKKLVDSTDKADLRLIYLALAHMIKFRGHFLIEGDLNPDNSDVDKLFIQLVQTYNQLFEENPINASGVDAKAILSARLSKSRRLENLIAQLPGEKKNGLFGNLIALSLGLTPNFKSNFDLAEDAKLQLSKDTYDDDLDNLLAQIGDQYADLFLAAKNLSDAILLSDILRVNTEITKAPLSASMIKRYDEHHQDLTLLKALVRQQLPEKYKEIFFDQSKNGYAGYIDGGASQEEFYKFIKPILEKMDGTEELLVKLNREDLLRKQRTFDNGSIPHQIHLGELHAILRRQEDFYPFLKDNREKIEKILTFRIPYYVGPLARGNSRFAWMTRKSEETITPWNFEEVVDKGASAQSFIERMTNFDKNLPNEKVLPKHSLLYEYFTVYNELTKVKYVTEGMRKPAFLSGEQKKAIVDLLFKTNRKVTVKQLKEDYFKKIECFDSVEISGVEDRFNASLGTYHDLLKIIKDKDFLDNEENEDILEDIVLTLTLFEDREMIEERLKTYAHLFDDKVMKQLKRRRYTGWGRLSRKLINGIRDKQSGKTILDFLKSDGFANRNFMQLIHDDSLTFKEDIQKAQVSGQGDSLHEHIANLAGSPAIKKGILQTVKVVDELVKVMGRHKPENIVIEMARENQTTQKGQKNSRERMKRIEEGIKELGSQILKEHPVENTQLQNEKLYLYYLQNGRDMYVDQELDINRLSDYDVDAIVPQSFLKDDSIDNKVLTRSDKNRGKSDNVPSEEVVKKMKNYWRQLLNAKLITQRKFDNLTKAERGGLSELDKAGFIKRQLVETRQITKHVAQILDSRMNTKYDENDKLIREVKVITLKSKLVSDFRKDFQFYKVREINNYHHAHDAYLNAVVGTALIKKYPKLESEFVYGDYKVYDVRKMIAKSEQEIGKATAKYFFYSNIMNFFKTEITLANGEIRKRPLIETNGETGEIVWDKGRDFATVRKVLSMPQVNIVKKTEVQTGGFSKESILPKRNSDKLIARKKDWDPKKYGGFDSPTVAYSVLVVAKVEKGKSKKLKSVKELLGITIMERSSFEKNPIDFLEAKGYKEVKKDLIIKLPKYSLFELENGRKRMLASAGELQKGNELALPSKYVNFLYLASHYEKLKGSPEDNEQKQLFVEQHKHYLDEIIEQISEFSKRVILADANLDKVLSAYNKHRDKPIREQAENIIHLFTLTNLGAPAAFKYFDTTIDRKRYTSTKEVLDATLIHQSITGLYETRIDLSQLGGDPKKKRKVGGPSSGAPPPSGGSPAGSPTSTEEGTSESATPESGPGTSTEPSEGSAPGSPAGSPTSTEEGTSTEPSEGSAPGTSTEPSETGENSDLLPVAQTEPSIWTVDDVWAFIHSLPGCQDIADEFRAQEIDGQALLLLKEDHLMSAMNIKLGPALKICARINSLKES

SEQ ID NO: 1073 - protein, 1547 aa, synthetic construct
  REGION 1..1547: note = Description of Artificial Sequence: Synthetic polypeptide
MGTPKKKRKVMDKKYSIGLAIGTNSVGWAVITDEYKVPSKKFKVLGNTDRHSIKKNLIGALLFDSGETAEATRLKRTARRRYTRRKNRICYLQEIFSNEMAKVDDSFFHRLEESFLVEEDKKHERHPIFGNIVDEVAYHEKYPTIYHLRKKLVDSTDKADLRLIYLALAHMIKFRGHFLIEGDLNPDNSDVDKLFIQLVQTYNQLFEENPINASGVDAKAILSARLSKSRRLENLIAQLPGEKKNGLFGNLIALSLGLTPNFKSNFDLAEDAKLQLSKDTYDDDLDNLLAQIGDQYADLFLAAKNLSDAILLSDILRVNTEITKAPLSASMIKRYDEHHQDLTLLKALVRQQLPEKYKEIFFDQSKNGYAGYIDGGASQEEFYKFIKPILEKMDGTEELLVKLNREDLLRKQRTFDNGSIPHQIHLGELHAILRRQEDFYPFLKDNREKIEKILTFRIPYYVGPLARGNSRFAWMTRKSEETITPWNFEEVVDKGASAQSFIERMTNFDKNLPNEKVLPKHSLLYEYFTVYNELTKVKYVTEGMRKPAFLSGEQKKAIVDLLFKTNRKVTVKQLKEDYFKKIECFDSVEISGVEDRFNASLGTYHDLLKIIKDKDFLDNEENEDILEDIVLTLTLFEDREMIEERLKTYAHLFDDKVMKQLKRRRYTGWGRLSRKLINGIRDKQSGKTILDFLKSDGFANRNFMQLIHDDSLTFKEDIQKAQVSGQGDSLHEHIANLAGSPAIKKGILQTVKVVDELVKVMGRHKPENIVIEMARENQTTQKGQKNSRERMKRIEEGIKELGSQILKEHPVENTQLQNEKLYLYYLQNGRDMYVDQELDINRLSDYDVDAIVPQSFLKDDSIDNKVLTRSDKNRGKSDNVPSEEVVKKMKNYWRQLLNAKLITQRKFDNLTKAERGGLSELDKAGFIKRQLVETRQITKHVAQILDSRMNTKYDENDKLIREVKVITLKSKLVSDFRKDFQFYKVREINNYHHAHDAYLNAVVGTALIKKYPKLESEFVYGDYKVYDVRKMIAKSEQEIGKATAKYFFYSNIMNFFKTEITLANGEIRKRPLIETNGETGEIVWDKGRDFATVRKVLSMPQVNIVKKTEVQTGGFSKESILPKRNSDKLIARKKDWDPKKYGGFDSPTVAYSVLVVAKVEKGKSKKLKSVKELLGITIMERSSFEKNPIDFLEAKGYKEVKKDLIIKLPKYSLFELENGRKRMLASAGELQKGNELALPSKYVNFLYLASHYEKLKGSPEDNEQKQLFVEQHKHYLDEIIEQISEFSKRVILADANLDKVLSAYNKHRDKPIREQAENIIHLFTLTNLGAPAAFKYFDTTIDRKRYTSTKEVLDATLIHQSITGLYETRIDLSQLGGDPKKKRKVGGPSSGAPPPSGGSPAGSPTSTEEGTSESATPESGPGTSTEPSEGSAPGSPAGSPTSTEEGTSTEPSEGSAPGTSTEPSETGAGPGGGSRSGSGRPAAANAARERSRVQTLRHAFLELQRTLPSVPPDTKLSKLDVLLLATTYIAHLTRSLQDDAEAPADAG

SEQ ID NO: 1074 - protein, 1547 aa, synthetic construct
  REGION 1..1547: note = Description of Artificial Sequence: Synthetic polypeptide
MGTPKKKRKVMDKKYSIGLAIGTNSVGWAVITDEYKVPSKKFKVLGNTDRHSIKKNLIGALLFDSGETAEATRLKRTARRRYTRRKNRICYLQEIFSNEMAKVDDSFFHRLEESFLVEEDKKHERHPIFGNIVDEVAYHEKYPTIYHLRKKLVDSTDKADLRLIYLALAHMIKFRGHFLIEGDLNPDNSDVDKLFIQLVQTYNQLFEENPINASGVDAKAILSARLSKSRRLENLIAQLPGEKKNGLFGNLIALSLGLTPNFKSNFDLAEDAKLQLSKDTYDDDLDNLLAQIGDQYADLFLAAKNLSDAILLSDILRVNTEITKAPLSASMIKRYDEHHQDLTLLKALVRQQLPEKYKEIFFDQSKNGYAGYIDGGASQEEFYKFIKPILEKMDGTEELLVKLNREDLLRKQRTFDNGSIPHQIHLGELHAILRRQEDFYPFLKDNREKIEKILTFRIPYYVGPLARGNSRFAWMTRKSEETITPWNFEEVVDKGASAQSFIERMTNFDKNLPNEKVLPKHSLLYEYFTVYNELTKVKYVTEGMRKPAFLSGEQKKAIVDLLFKTNRKVTVKQLKEDYFKKIECFDSVEISGVEDRFNASLGTYHDLLKIIKDKDFLDNEENEDILEDIVLTLTLFEDREMIEERLKTYAHLFDDKVMKQLKRRRYTGWGRLSRKLINGIRDKQSGKTILDFLKSDGFANRNFMQLIHDDSLTFKEDIQKAQVSGQGDSLHEHIANLAGSPAIKKGILQTVKVVDELVKVMGRHKPENIVIEMARENQTTQKGQKNSRERMKRIEEGIKELGSQILKEHPVENTQLQNEKLYLYYLQNGRDMYVDQELDINRLSDYDVDAIVPQSFLKDDSIDNKVLTRSDKNRGKSDNVPSEEVVKKMKNYWRQLLNAKLITQRKFDNLTKAERGGLSELDKAGFIKRQLVETRQITKHVAQILDSRMNTKYDENDKLIREVKVITLKSKLVSDFRKDFQFYKVREINNYHHAHDAYLNAVVGTALIKKYPKLESEFVYGDYKVYDVRKMIAKSEQEIGKATAKYFFYSNIMNFFKTEITLANGEIRKRPLIETNGETGEIVWDKGRDFATVRKVLSMPQVNIVKKTEVQTGGFSKESILPKRNSDKLIARKKDWDPKKYGGFDSPTVAYSVLVVAKVEKGKSKKLKSVKELLGITIMERSSFEKNPIDFLEAKGYKEVKKDLIIKLPKYSLFELENGRKRMLASAGELQKGNELALPSKYVNFLYLASHYEKLKGSPEDNEQKQLFVEQHKHYLDEIIEQISEFSKRVILADANLDKVLSAYNKHRDKPIREQAENIIHLFTLTNLGAPAAFKYFDTTIDRKRYTSTKEVLDATLIHQSITGLYETRIDLSQLGGDPKKKRKVGGPSSGAPPPSGGSPAGSPTSTEEGTSESATPESGPGTSTEPSEGSAPGSPAGSPTSTEEGTSTEPSEGSAPGTSTEPSETGQHPPDACAFRRGRKKRIPYSKGQLRELEREYAANKFITKDKRRKISAATSLSERQITIWFQNRRVKEKKVLAKVKNSATP

SEQ ID NO: 1075 - protein, 1547 aa, synthetic construct
  REGION 1..1547: note = Description of Artificial Sequence: Synthetic polypeptide
MGTPKKKRKVMDKKYSIGLAIGTNSVGWAVITDEYKVPSKKFKVLGNTDRHSIKKNLIGALLFDSGETAEATRLKRTARRRYTRRKNRICYLQEIFSNEMAKVDDSFFHRLEESFLVEEDKKHERHPIFGNIVDEVAYHEKYPTIYHLRKKLVDSTDKADLRLIYLALAHMIKFRGHFLIEGDLNPDNSDVDKLFIQLVQTYNQLFEENPINASGVDAKAILSARLSKSRRLENLIAQLPGEKKNGLFGNLIALSLGLTPNFKSNFDLAEDAKLQLSKDTYDDDLDNLLAQIGDQYADLFLAAKNLSDAILLSDILRVNTEITKAPLSASMIKRYDEHHQDLTLLKALVRQQLPEKYKEIFFDQSKNGYAGYIDGGASQEEFYKFIKPILEKMDGTEELLVKLNREDLLRKQRTFDNGSIPHQIHLGELHAILRRQEDFYPFLKDNREKIEKILTFRIPYYVGPLARGNSRFAWMTRKSEETITPWNFEEVVDKGASAQSFIERMTNFDKNLPNEKVLPKHSLLYEYFTVYNELTKVKYVTEGMRKPAFLSGEQKKAIVDLLFKTNRKVTVKQLKEDYFKKIECFDSVEISGVEDRFNASLGTYHDLLKIIKDKDFLDNEENEDILEDIVLTLTLFEDREMIEERLKTYAHLFDDKVMKQLKRRRYTGWGRLSRKLINGIRDKQSGKTILDFLKSDGFANRNFMQLIHDDSLTFKEDIQKAQVSGQGDSLHEHIANLAGSPAIKKGILQTVKVVDELVKVMGRHKPENIVIEMARENQTTQKGQKNSRERMKRIEEGIKELGSQILKEHPVENTQLQNEKLYLYYLQNGRDMYVDQELDINRLSDYDVDAIVPQSFLKDDSIDNKVLTRSDKNRGKSDNVPSEEVVKKMKNYWRQLLNAKLITQRKFDNLTKAERGGLSELDKAGFIKRQLVETRQITKHVAQILDSRMNTKYDENDKLIREVKVITLKSKLVSDFRKDFQFYKVREINNYHHAHDAYLNAVVGTALIKKYPKLESEFVYGDYKVYDVRKMIAKSEQEIGKATAKYFFYSNIMNFFKTEITLANGEIRKRPLIETNGETGEIVWDKGRDFATVRKVLSMPQVNIVKKTEVQTGGFSKESILPKRNSDKLIARKKDWDPKKYGGFDSPTVAYSVLVVAKVEKGKSKKLKSVKELLGITIMERSSFEKNPIDFLEAKGYKEVKKDLIIKLPKYSLFELENGRKRMLASAGELQKGNELALPSKYVNFLYLASHYEKLKGSPEDNEQKQLFVEQHKHYLDEIIEQISEFSKRVILADANLDKVLSAYNKHRDKPIREQAENIIHLFTLTNLGAPAAFKYFDTTIDRKRYTSTKEVLDATLIHQSITGLYETRIDLSQLGGDPKKKRKVGGPSSGAPPPSGGSPAGSPTSTEEGTSESATPESGPGTSTEPSEGSAPGSPAGSPTSTEEGTSTEPSEGSAPGTSTEPSETGSMSPTTSSQILARKRRRGIIEKRRRDRINNSLSELRRLVPSAFEKQGSAKLEKAEILQMTVDHLKMLHTAGGKGYFDAHA

SEQ ID NO: 1076 - protein, 1547 aa, synthetic construct
  REGION 1..1547: note = Description of Artificial Sequence: Synthetic polypeptide
MGTPKKKRKVMDKKYSIGLAIGTNSVGWAVITDEYKVPSKKFKVLGNTDRHSIKKNLIGALLFDSGETAEATRLKRTARRRYTRRKNRICYLQEIFSNEMAKVDDSFFHRLEESFLVEEDKKHERHPIFGNIVDEVAYHEKYPTIYHLRKKLVDSTDKADLRLIYLALAHMIKFRGHFLIEGDLNPDNSDVDKLFIQLVQTYNQLFEENPINASGVDAKAILSARLSKSRRLENLIAQLPGEKKNGLFGNLIALSLGLTPNFKSNFDLAEDAKLQLSKDTYDDDLDNLLAQIGDQYADLFLAAKNLSDAILLSDILRVNTEITKAPLSASMIKRYDEHHQDLTLLKALVRQQLPEKYKEIFFDQSKNGYAGYIDGGASQEEFYKFIKPILEKMDGTEELLVKLNREDLLRKQRTFDNGSIPHQIHLGELHAILRRQEDFYPFLKDNREKIEKILTFRIPYYVGPLARGNSRFAWMTRKSEETITPWNFEEVVDKGASAQSFIERMTNFDKNLPNEKVLPKHSLLYEYFTVYNELTKVKYVTEGMRKPAFLSGEQKKAIVDLLFKTNRKVTVKQLKEDYFKKIECFDSVEISGVEDRFNASLGTYHDLLKIIKDKDFLDNEENEDILEDIVLTLTLFEDREMIEERLKTYAHLFDDKVMKQLKRRRYTGWGRLSRKLINGIRDKQSGKTILDFLKSDGFANRNFMQLIHDDSLTFKEDIQKAQVSGQGDSLHEHIANLAGSPAIKKGILQTVKVVDELVKVMGRHKPENIVIEMARENQTTQKGQKNSRERMKRIEEGIKELGSQILKEHPVENTQLQNEKLYLYYLQNGRDMYVDQELDINRLSDYDVDAIVPQSFLKDDSIDNKVLTRSDKNRGKSDNVPSEEVVKKMKNYWRQLLNAKLITQRKFDNLTKAERGGLSELDKAGFIKRQLVETRQITKHVAQILDSRMNTKYDENDKLIREVKVITLKSKLVSDFRKDFQFYKVREINNYHHAHDAYLNAVVGTALIKKYPKLESEFVYGDYKVYDVRKMIAKSEQEIGKATAKYFFYSNIMNFFKTEITLANGEIRKRPLIETNGETGEIVWDKGRDFATVRKVLSMPQVNIVKKTEVQTGGFSKESILPKRNSDKLIARKKDWDPKKYGGFDSPTVAYSVLVVAKVEKGKSKKLKSVKELLGITIMERSSFEKNPIDFLEAKGYKEVKKDLIIKLPKYSLFELENGRKRMLASAGELQKGNELALPSKYVNFLYLASHYEKLKGSPEDNEQKQLFVEQHKHYLDEIIEQISEFSKRVILADANLDKVLSAYNKHRDKPIREQAENIIHLFTLTNLGAPAAFKYFDTTIDRKRYTSTKEVLDATLIHQSITGLYETRIDLSQLGGDPKKKRKVGGPSSGAPPPSGGSPAGSPTSTEEGTSESATPESGPGTSTEPSEGSAPGSPAGSPTSTEEGTSTEPSEGSAPGTSTEPSETGLVGMGHHFLPSEPTKWNVEDVYEFIRSLPGCQEIAEEFRAQEIDGQALLLLKEDHLMSAMNIKLGPALKIYARISMLKDS

SEQ ID NO: 1077 - protein, 1547 aa, synthetic construct
  REGION 1..1547: note = Description of Artificial Sequence: Synthetic polypeptide
MGTPKKKRKVMDKKYSIGLAIGTNSVGWAVITDEYKVPSKKFKVLGNTDRHSIKKNLIGALLFDSGETAEATRLKRTARRRYTRRKNRICYLQEIFSNEMAKVDDSFFHRLEESFLVEEDKKHERHPIFGNIVDEVAYHEKYPTIYHLRKKLVDSTDKADLRLIYLALAHMIKFRGHFLIEGDLNPDNSDVDKLFIQLVQTYNQLFEENPINASGVDAKAILSARLSKSRRLENLIAQLPGEKKNGLFGNLIALSLGLTPNFKSNFDLAEDAKLQLSKDTYDDDLDNLLAQIGDQYADLFLAAKNLSDAILLSDILRVNTEITKAPLSASMIKRYDEHHQDLTLLKALVRQQLPEKYKEIFFDQSKNGYAGYIDGGASQEEFYKFIKPILEKMDGTEELLVKLNREDLLRKQRTFDNGSIPHQIHLGELHAILRRQEDFYPFLKDNREKIEKILTFRIPYYVGPLARGNSRFAWMTRKSEETITPWNFEEVVDKGASAQSFIERMTNFDKNLPNEKVLPKHSLLYEYFTVYNELTKVKYVTEGMRKPAFLSGEQKKAIVDLLFKTNRKVTVKQLKEDYFKKIECFDSVEISGVEDRFNASLGTYHDLLKIIKDKDFLDNEENEDILEDIVLTLTLFEDREMIEERLKTYAHLFDDKVMKQLKRRRYTGWGRLSRKLINGIRDKQSGKTILDFLKSDGFANRNFMQLIHDDSLTFKEDIQKAQVSGQGDSLHEHIANLAGSPAIKKGILQTVKVVDELVKVMGRHKPENIVIEMARENQTTQKGQKNSRERMKRIEEGIKELGSQILKEHPVENTQLQNEKLYLYYLQNGRDMYVDQELDINRLSDYDVDAIVPQSFLKDDSIDNKVLTRSDKNRGKSDNVPSEEVVKKMKNYWRQLLNAKLITQRKFDNLTKAERGGLSELDKAGFIKRQLVETRQITKHVAQILDSRMNTKYDENDKLIREVKVITLKSKLVSDFRKDFQFYKVREINNYHHAHDAYLNAVVGTALIKKYPKLESEFVYGDYKVYDVRKMIAKSEQEIGKATAKYFFYSNIMNFFKTEITLANGEIRKRPLIETNGETGEIVWDKGRDFATVRKVLSMPQVNIVKKTEVQTGGFSKESILPKRNSDKLIARKKDWDPKKYGGFDSPTVAYSVLVVAKVEKGKSKKLKSVKELLGITIMERSSFEKNPIDFLEAKGYKEVKKDLIIKLPKYSLFELENGRKRMLASAGELQKGNELALPSKYVNFLYLASHYEKLKGSPEDNEQKQLFVEQHKHYLDEIIEQISEFSKRVILADANLDKVLSAYNKHRDKPIREQAENIIHLFTLTNLGAPAAFKYFDTTIDRKRYTSTKEVLDATLIHQSITGLYETRIDLSQLGGDPKKKRKVGGPSSGAPPPSGGSPAGSPTSTEEGTSESATPESGPGTSTEPSEGSAPGSPAGSPTSTEEGTSTEPSEGSAPGTSTEPSETGGYSSTENLQLVLERRRVANAKERERIKNLNRGFARLKALVPFLPQSRKPSKVDILKGATEYIQVLSDLLEGAKDSKKQDP

SEQ ID NO: 1078 - protein, 2758 aa, synthetic construct
  REGION 1..2758: note = Description of Artificial Sequence: Synthetic polypeptide
MGTPKKKRKVMDKKYSIGLAIGTNSVGWAVITDEYKVPSKKFKVLGNTDRHSIKKNLIGALLFDSGETAEATRLKRTARRRYTRRKNRICYLQEIFSNEMAKVDDSFFHRLEESFLVEEDKKHERHPIFGNIVDEVAYHEKYPTIYHLRKKLVDSTDKADLRLIYLALAHMIKFRGHFLIEGDLNPDNSDVDKLFIQLVQTYNQLFEENPINASGVDAKAILSARLSKSRRLENLIAQLPGEKKNGLFGNLIALSLGLTPNFKSNFDLAEDAKLQLSKDTYDDDLDNLLAQIGDQYADLFLAAKNLSDAILLSDILRVNTEITKAPLSASMIKRYDEHHQDLTLLKALVRQQLPEKYKEIFFDQSKNGYAGYIDGGASQEEFYKFIKPILEKMDGTEELLVKLNREDLLRKQRTFDNGSIPHQIHLGELHAILRRQEDFYPFLKDNREKIEKILTFRIPYYVGPLARGNSRFAWMTRKSEETITPWNFEEVVDKGASAQSFIERMTNFDKNLPNEKVLPKHSLLYEYFTVYNELTKVKYVTEGMRKPAFLSGEQKKAIVDLLFKTNRKVTVKQLKEDYFKKIECFDSVEISGVEDRFNASLGTYHDLLKIIKDKDFLDNEENEDILEDIVLTLTLFEDREMIEERLKTYAHLFDDKVMKQLKRRRYTGWGRLSRKLINGIRDKQSGKTILDFLKSDGFANRNFMQLIHDDSLTFKEDIQKAQVSGQGDSLHEHIANLAGSPAIKKGILQTVKVVDELVKVMGRHKPENIVIEMARENQTTQKGQKNSRERMKRIEEGIKELGSQILKEHPVENTQLQNEKLYLYYLQNGRDMYVDQELDINRLSDYDVDAIVPQSFLKDDSIDNKVLTRSDKNRGKSDNVPSEEVVKKMKNYWRQLLNAKLITQRKFDNLTKAERGGLSELDKAGFIKRQLVETRQITKHVAQILDSRMNTKYDENDKLIREVKVITLKSKLVSDFRKDFQFYKVREINNYHHAHDAYLNAVVGTALIKKYPKLESEFVYGDYKVYDVRKMIAKSEQEIGKATAKYFFYSNIMNFFKTEITLANGEIRKRPLIETNGETGEIVWDKGRDFATVRKVLSMPQVNIVKKTEVQTGGFSKESILPKRNSDKLIARKKDWDPKKYGGFDSPTVAYSVLVVAKVEKGKSKKLKSVKELLGITIMERSSFEKNPIDFLEAKGYKEVKKDLIIKLPKYSLFELENGRKRMLASAGELQKGNELALPSKYVNFLYLASHYEKLKGSPEDNEQKQLFVEQHKHYLDEIIEQISEFSKRVILADANLDKVLSAYNKHRDKPIREQAENIIHLFTLTNLGAPAAFKYFDTTIDRKRYTSTKEVLDATLIHQSITGLYETRIDLSQLGGDPKKKRKVGGPSSGAPPPSGGSPAGSPTSTEEGTSESATPESGPGTSTEPSEGSAPGSPAGSPTSTEEGTSTEPSEGSAPGTSTEPSETGMSSLPGCIGLDAATATVESEEIAELQQAVVEELGISMEELRHFIDEELEKMDCVQQRKKQLAELETWVIQKESEVAHVDQLFDDASRAVTNCESLVKDFYSKLGLQYRDSSSEDESSRPTEIIEIPDEDDDVLSIDSGDAGSRTPKDQKLREAMAALRKSAQDVQKFMDAVNKKSSSQDLHKGTLSQMSGELSKDGDLIVSMRILGKKRTKTWHKGTLIAIQTVGPGKKYKVKFDNKGKSLLSGNHIAYDYHPPADKLYVGSRVVAKYKDGNQVWLYAGIVAETPNVKNKLRFLIFFDDGYASYVTQSELYPICRPLKKTWEDIEDISCRDFIEEYVTAYPNRPMVLLKSGQLIKTEWEGTWWKSRVEEVDGSLVRILFLDDKRCEWIYRGSTRLEPMFSMKTSSASALEKKQGQLRTRPNMGAVRSKGPVVQYTQDLTGTGTQFKPVEPPQPTAPPAPPFPPAPPLSPQAGDSDLESQLAQSRKQVAKKSTSFRPGSVGSGHSSPTSPALSENVSGGKPGINQTYRSPLGSTASAPAPSALPAPPAPPVFHGMLERAPAEPSYRAPMEKLFYLPHVCSYTCLSRVRPMRNEQYRGKNPLLVPLLYDFRRMTARRRVNRKMGFHVIYKTPCGLCLRTMQEIERYLFETGCDFLFLEMFCLDPYVLVDRKFQPYKPFYYILDITYGKEDVPLSCVNEIDTTPPPQVAYSKERIPGKGVFINTGPEFLVGCDCKDGCRDKSKCACHQLTIQATACTPGGQINPNSGYQYKRLEECLPTGVYECNKRCKCDPNMCTNRLVQHGLQVRLQLFKTQNKGWGIRCLDDIAKGSFVCIYAGKILTDDFADKEGLEMGDEYFANLDHIESVENFKEGYESDAPCSSDSSGVDLKDQEDGNSGTEDPEESNDDSSDDNFCKDEDFSTSSVWRSYATRRQTRGQKENGLSETTSKDSHPPDLGPPHIPVPPSIPVGGCNPPSSEETPKNKVASWLSCNSVSEGGFADSDSHSSFKTNEGGEGRAGGSRMEAEKASTSGLGIKDEGDIKQAKKEDTDDRNKMSVVTESSRNYGYNPSPVKPEGLRRPPSKTSMHQSRRLMASAQSNPDDVLTLSSSTESEGESGTSRKPTAGQTSATAVDSDDIQTISSGSEGDDFEDKKNMTGPMKRQVAVKSTRGFALKSTHGIAIKSTNMASVDKGESAPVRKNTRQFYDGEESCYIIDAKLEGNLGRYLNHSCSPNLFVQNVFVDTHDLRFPWVAFFASKRIRAGTELTWDYNYEVGSVEGKELLCCCGAIECRGRLL

SEQ ID NO: 1079 - protein, 2072 aa, synthetic construct
  REGION 1..2072: note = Description of Artificial Sequence: Synthetic polypeptide
MGTPKKKRKVMDKKYSIGLAIGTNSVGWAVITDEYKVPSKKFKVLGNTDRHSIKKNLIGALLFDSGETAEATRLKRTARRRYTRRKNRICYLQEIFSNEMAKVDDSFFHRLEESFLVEEDKKHERHPIFGNIVDEVAYHEKYPTIYHLRKKLVDSTDKADLRLIYLALAHMIKFRGHFLIEGDLNPDNSDVDKLFIQLVQTYNQLFEENPINASGVDAKAILSARLSKSRRLENLIAQLPGEKKNGLFGNLIALSLGLTPNFKSNFDLAEDAKLQLSKDTYDDDLDNLLAQIGDQYADLFLAAKNLSDAILLSDILRVNTEITKAPLSASMIKRYDEHHQDLTLLKALVRQQLPEKYKEIFFDQSKNGYAGYIDGGASQEEFYKFIKPILEKMDGTEELLVKLNREDLLRKQRTFDNGSIPHQIHLGELHAILRRQEDFYPFLKDNREKIEKILTFRIPYYVGPLARGNSRFAWMTRKSEETITPWNFEEVVDKGASAQSFIERMTNFDKNLPNEKVLPKHSLLYEYFTVYNELTKVKYVTEGMRKPAFLSGEQKKAIVDLLFKTNRKVTVKQLKEDYFKKIECFDSVEISGVEDRFNASLGTYHDLLKIIKDKDFLDNEENEDILEDIVLTLTLFEDREMIEERLKTYAHLFDDKVMKQLKRRRYTGWGRLSRKLINGIRDKQSGKTILDFLKSDGFANRNFMQLIHDDSLTFKEDIQKAQVSGQGDSLHEHIANLAGSPAIKKGILQTVKVVDELVKVMGRHKPENIVIEMARENQTTQKGQKNSRERMKRIEEGIKELGSQILKEHPVENTQLQNEKLYLYYLQNGRDMYVDQELDINRLSDYDVDAIVPQSFLKDDSIDNKVLTRSDKNRGKSDNVPSEEVVKKMKNYWRQLLNAKLITQRKFDNLTKAERGGLSELDKAGFIKRQLVETRQITKHVAQILDSRMNTKYDENDKLIREVKVITLKSKLVSDFRKDFQFYKVREINNYHHAHDAYLNAVVGTALIKKYPKLESEFVYGDYKVYDVRKMIAKSEQEIGKATAKYFFYSNIMNFFKTEITLANGEIRKRPLIETNGETGEIVWDKGRDFATVRKVLSMPQVNIVKKTEVQTGGFSKESILPKRNSDKLIARKKDWDPKKYGGFDSPTVAYSVLVVAKVEKGKSKKLKSVKELLGITIMERSSFEKNPIDFLEAKGYKEVKKDLIIKLPKYSLFELENGRKRMLASAGELQKGNELALPSKYVNFLYLASHYEKLKGSPEDNEQKQLFVEQHKHYLDEIIEQISEFSKRVILADANLDKVLSAYNKHRDKPIREQAENIIHLFTLTNLGAPAAFKYFDTTIDRKRYTSTKEVLDATLIHQSITGLYETRIDLSQLGGDPKKKRKVGGPSSGAPPPSGGSPAGSPTSTEEGTSESATPESGPGTSTEPSEGSAPGSPAGSPTSTEEGTSTEPSEGSAPGTSTEPSETGMAEDWLDCPALGPGWKRREVFRKSGATCGRSDTYYQSPTGDRIRSKVELTRYLGPACDLTLFDFKQGILCYPAPKAHPVAVASKKRKKPSRPAKTRKRQVGPQSGEVRKEAPRDETKADTDTAPASFPAPGCCENCGISFSGDGTQRQRLKTLCKDCRAQRIAFNREQRMFKRVGCGECAACQVTEDCGACSTCLLQLPHDVASGLFCKCERRRCLRIVERSRGCGVCRGCQTQEDCGHCPICLRPPRPGLRRQWKCVQRRCLRGKHARRKGGCDSKMAARRRPGAQPLPPPPPSQSPEPTEPHPRALAPSPPAEFIYYCVDEDELQPYTNRRQNRKCGACAACLRRMDCGRCDFCCDKPKFGGSNQKRQKCRWRQCLQFAMKRLLPSVWSESEDGAGSPPPYRRRKRPSSARRHHLGPTLKPTLATRTAQPDHTQAPTKQEAGGGFVLPPPGTDLVFLREGASSPVQVPGPVAASTEALLQEAQCSGLSWVVALPQVKQEKADTQDEWTPGTAVLTSPVLVPGCPSKAVDPGLPSVKQEPPDPEEDKEENKDDSASKLAPEEEAGGAGTPVITEIFSLGGTRFRDTAVWLPRSKDLKKPGARKQ

SEQ ID NO: 1080 - protein, 1878 aa, synthetic construct
  REGION 1..1878: note = Description of Artificial Sequence: Synthetic polypeptide
MGTPKKKRKVMDKKYSIGLAIGTNSVGWAVITDEYKVPSKKFKVLGNTDRHSIKKNLIGALLFDSGETAEATRLKRTARRRYTRRKNRICYLQEIFSNEMAKVDDSFFHRLEESFLVEEDKKHERHPIFGNIVDEVAYHEKYPTIYHLRKKLVDSTDKADLRLIYLALAHMIKFRGHFLIEGDLNPDNSDVDKLFIQLVQTYNQLFEENPINASGVDAKAILSARLSKSRRLENLIAQLPGEKKNGLFGNLIALSLGLTPNFKSNFDLAEDAKLQLSKDTYDDDLDNLLAQIGDQYADLFLAAKNLSDAILLSDILRVNTEITKAPLSASMIKRYDEHHQDLTLLKALVRQQLPEKYKEIFFDQSKNGYAGYIDGGASQEEFYKFIKPILEKMDGTEELLVKLNREDLLRKQRTFDNGSIPHQIHLGELHAILRRQEDFYPFLKDNREKIEKILTFRIPYYVGPLARGNSRFAWMTRKSEETITPWNFEEVVDKGASAQSFIERMTNFDKNLPNEKVLPKHSLLYEYFTVYNELTKVKYVTEGMRKPAFLSGEQKKAIVDLLFKTNRKVTVKQLKEDYFKKIECFDSVEISGVEDRFNASLGTYHDLLKIIKDKDFLDNEENEDILEDIVLTLTLFEDREMIEERLKTYAHLFDDKVMKQLKRRRYTGWGRLSRKLINGIRDKQSGKTILDFLKSDGFANRNFMQLIHDDSLTFKEDIQKAQVSGQGDSLHEHIANLAGSPAIKKGILQTVKVVDELVKVMGRHKPENIVIEMARENQTTQKGQKNSRERMKRIEEGIKELGSQILKEHPVENTQLQNEKLYLYYLQNGRDMYVDQELDINRLSDYDVDAIVPQSFLKDDSIDNKVLTRSDKNRGKSDNVPSEEVVKKMKNYWRQLLNAKLITQRKFDNLTKAERGGLSELDKAGFIKRQLVETRQITKHVAQILDSRMNTKYDENDKLIREVKVITLKSKLVSDFRKDFQFYKVREINNYHHAHDAYLNAVVGTALIKKYPKLESEFVYGDYKVYDVRKMIAKSEQEIGKATAKYFFYSNIMNFFKTEITLANGEIRKRPLIETNGETGEIVWDKGRDFATVRKVLSMPQVNIVKKTEVQTGGFSKESILPKRNSDKLIARKKDWDPKKYGGFDSPTVAYSVLVVAKVEKGKSKKLKSVKELLGITIMERSSFEKNPIDFLEAKGYKEVKKDLIIKLPKYSLFELENGRKRMLASAGELQKGNELALPSKYVNFLYLASHYEKLKGSPEDNEQKQLFVEQHKHYLDEIIEQISEFSKRVILADANLDKVLSAYNKHRDKPIREQAENIIHLFTLTNLGAPAAFKYFDTTIDRKRYTSTKEVLDATLIHQSITGLYETRIDLSQLGGDPKKKRKVGGPSSGAPPPSGGSPAGSPTSTEEGTSESATPESGPGTSTEPSEGSAPGSPAGSPTSTEEGTSTEPSEGSAPGTSTEPSETGMRAHPGGGRCCPEQEEGESAAGGSGAGGDSAIEQGGQGSALAPSPVSGVRREGARGGGRGRGRWKQAGRGGGVCGRGRGRGRGRGRGRGRGRGRGRPPSGGSGLGGDGGGCGGGGSGGGGAPRREPVPFPSGSAGPGPRGPRATESGKRMDCPALPPGWKKEEVIRKSGLSAGKSDVYYFSPSGKKFRSKPQLARYLGNTVDLSSFDFRTGKMMPSKLQKNKQRLRNDPLNQNKGKPDLNTTLPIRQTASIFKQPVTKVTNHPSNKVKSDPQRMNEQPRQLFWEKRLQGLSASDVTEQIIKTMELPKGLQGVGPGSNDETLLSAVASALHTSSAPITGQVSAAVEKNPAVWLNTSQPLCKAFIVTDEDIRKQEERVQQVRKKLEEALMADILSRAADTEEMDIEMDSGDEA

SEQ ID NO: 1081 - protein, 1758 aa, synthetic construct
  REGION 1..1758: note = Description of Artificial Sequence: Synthetic polypeptide
MGTPKKKRKVMDKKYSIGLAIGTNSVGWAVITDEYKVPSKKFKVLGNTDRHSIKKNLIGALLFDSGETAEATRLKRTARRRYTRRKNRICYLQEIFSNEMAKVDDSFFHRLEESFLVEEDKKHERHPIFGNIVDEVAYHEKYPTIYHLRKKLVDSTDKADLRLIYLALAHMIKFRGHFLIEGDLNPDNSDVDKLFIQLVQTYNQLFEENPINASGVDAKAILSARLSKSRRLENLIAQLPGEKKNGLFGNLIALSLGLTPNFKSNFDLAEDAKLQLSKDTYDDDLDNLLAQIGDQYADLFLAAKNLSDAILLSDILRVNTEITKAPLSASMIKRYDEHHQDLTLLKALVRQQLPEKYKEIFFDQSKNGYAGYIDGGASQEEFYKFIKPILEKMDGTEELLVKLNREDLLRKQRTFDNGSIPHQIHLGELHAILRRQEDFYPFLKDNREKIEKILTFRIPYYVGPLARGNSRFAWMTRKSEETITPWNFEEVVDKGASAQSFIERMTNFDKNLPNEKVLPKHSLLYEYFTVYNELTKVKYVTEGMRKPAFLSGEQKKAIVDLLFKTNRKVTVKQLKEDYFKKIECFDSVEISGVEDRFNASLGTYHDLLKIIKDKDFLDNEENEDILEDIVLTLTLFEDREMIEERLKTYAHLFDDKVMKQLKRRRYTGWGRLSRKLINGIRDKQSGKTILDFLKSDGFANRNFMQLIHDDSLTFKEDIQKAQVSGQGDSLHEHIANLAGSPAIKKGILQTVKVVDELVKVMGRHKPENIVIEMARENQTTQKGQKNSRERMKRIEEGIKELGSQILKEHPVENTQLQNEKLYLYYLQNGRDMYVDQELDINRLSDYDVDAIVPQSFLKDDSIDNKVLTRSDKNRGKSDNVPSEEVVKKMKNYWRQLLNAKLITQRKFDNLTKAERGGLSELDKAGFIKRQLVETRQITKHVAQILDSRMNTKYDENDKLIREVKVITLKSKLVSDFRKDFQFYKVREINNYHHAHDAYLNAVVGTALIKKYPKLESEFVYGDYKVYDVRKMIAKSEQEIGKATAKYFFYSNIMNFFKTEITLANGEIRKRPLIETNGETGEIVWDKGRDFATVRKVLSMPQVNIVKKTEVQTGGFSKESILPKRNSDKLIARKKDWDPKKYGGFDSPTVAYSVLVVAKVEKGKSKKLKSVKELLGITIMERSSFEKNPIDFLEAKGYKEVKKDLIIKLPKYSLFELENGRKRMLASAGELQKGNELALPSKYVNFLYLASHYEKLKGSPEDNEQKQLFVEQHKHYLDEIIEQISEFSKRVILADANLDKVLSAYNKHRDKPIREQAENIIHLFTLTNLGAPAAFKYFDTTIDRKRYTSTKEVLDATLIHQSITGLYETRIDLSQLGGDPKKKRKVGGPSSGAPPPSGGSPAGSPTSTEEGTSESATPESGPGTSTEPSEGSAPGSPAGSPTSTEEGTSTEPSEGSAPGTSTEPSETGMERKRWECPALPQGWEREEVPRRSGLSAGHRDVFYYSPSGKKFRSKPQLARYLGGSMDLSTFDFRTGKMLMSKMNKSRQRVRYDSSNQVKGKPDLNTALPVRQTASIFKQPVTKITNHPSNKVKSDPQKAVDQPRQLFWEKKLSGLNAFDIAEELVKTMDLPKGLQGVGPGCTDETLLSAIASALHTSTMPITGQLSAAVEKNPGVWLNTTQPLCKAFMVTDEDIRKQEELVQQVRKRLEEALMADMLAHVEELARDGEAPLDKACAEDDDEEDEEEEEEEPDPDPEMEHV

SEQ ID NO: 1082 - protein, 2047 aa, synthetic construct
  REGION 1..2047: note = Description of Artificial Sequence: Synthetic polypeptide
MGTPKKKRKVMDKKYSIGLAIGTNSVGWAVITDEYKVPSKKFKVLGNTDRHSIKKNLIGALLFDSGETAEATRLKRTARRRYTRRKNRICYLQEIFSNEMAKVDDSFFHRLEESFLVEEDKKHERHPIFGNIVDEVAYHEKYPTIYHLRKKLVDSTDKADLRLIYLALAHMIKFRGHFLIEGDLNPDNSDVDKLFIQLVQTYNQLFEENPINASGVDAKAILSARLSKSRRLENLIAQLPGEKKNGLFGNLIALSLGLTPNFKSNFDLAEDAKLQLSKDTYDDDLDNLLAQIGDQYADLFLAAKNLSDAILLSDILRVNTEITKAPLSASMIKRYDEHHQDLTLLKALVRQQLPEKYKEIFFDQSKNGYAGYIDGGASQEEFYKFIKPILEKMDGTEELLVKLNREDLLRKQRTFDNGSIPHQIHLGELHAILRRQEDFYPFLKDNREKIEKILTFRIPYYVGPLARGNSRFAWMTRKSEETITPWNFEEVVDKGASAQSFIERMTNFDKNLPNEKVLPKHSLLYEYFTVYNELTKVKYVTEGMRKPAFLSGEQKKAIVDLLFKTNRKVTVKQLKEDYFKKIECFDSVEISGVEDRFNASLGTYHDLLKIIKDKDFLDNEENEDILEDIVLTLTLFEDREMIEERLKTYAHLFDDKVMKQLKRRRYTGWGRLSRKLINGIRDKQSGKTILDFLKSDGFANRNFMQLIHDDSLTFKEDIQKAQVSGQGDSLHEHIANLAGSPAIKKGILQTVKVVDELVKVMGRHKPENIVIEMARENQTTQKGQKNSRERMKRIEEGIKELGSQILKEHPVENTQLQNEKLYLYYLQNGRDMYVDQELDINRLSDYDVDAIVPQSFLKDDSIDNKVLTRSDKNRGKSDNVPSEEVVKKMKNYWRQLLNAKLITQRKFDNLTKAERGGLSELDKAGFIKRQLVETRQITKHVAQILDSRMNTKYDENDKLIREVKVITLKSKLVSDFRKDFQFYKVREINNYHHAHDAYLNAVVGTALIKKYPKLESEFVYGDYKVYDVRKMIAKSEQEIGKATAKYFFYSNIMNFFKTEITLANGEIRKRPLIETNGETGEIVWDKGRDFATVRKVLSMPQVNIVKKTEVQTGGFSKESILPKRNSDKLIARKKDWDPKKYGGFDSPTVAYSVLVVAKVEKGKSKKLKSVKELLGITIMERSSFEKNPIDFLEAKGYKEVKKDLIIKLPKYSLFELENGRKRMLASAGELQKGNELALPSKYVNFLYLASHYEKLKGSPEDNEQKQLFVEQHKHYLDEIIEQISEFSKRVILADANLDKVLSAYNKHRDKPIREQAENIIHLFTLTNLGAPAAFKYFDTTIDRKRYTSTKEVLDATLIHQSITGLYETRIDLSQLGGDPKKKRKVGGPSSGAPPPSGGSPAGSPTSTEEGTSESATPESGPGTSTEPSEGSAPGSPAGSPTSTEEGTSTEPSEGSAPGTSTEPSETGMGTTGLESLSLGDRGAAPTVTSSERLVPDPPNDLRKEDVAMELERVGEDEEQMMIKRSSECNPLLQEPIASAQFGATAGTECRKSVPCGWERVVKQRLFGKTAGRFDVYFISPQGLKFRSKSSLANYLHKNGETSLKPEDFDFTVLSKRGIKSRYKDCSMAALTSHLQNQSNNSNWNLRTRSKCKKDVFMPPSSSSELQESRGLSNFTSTHLLLKEDEGVDDVNFRKVRKPKGKVTILKGIPIKKTKKGCRKSCSGFVQSDSKRESVCNKADAESEPVAQKSQLDRTVCISDAGACGETLSVTSEENSLVKKKERSLSSGSNFCSEQKTSGIINKFCSAKDSEHNEKYEDTFLESEEIGTKVEVVERKEHLHTDILKRGSEMDNNCSPTRKDFTGEKIFQEDTIPRTQIERRKTSLYFSSKYNKEALSPPRRKAFKKWTPPRSPFNLVQETLFHDPWKLLIATIFLNRTSGKMAIPVLWKFLEKYPSAEVARTADWRDVSELLKPLGLYDLRAKTIVKFSDEYLTKQWKYPIELHGIGKYGNDSYRIFCVNEWKQVHPEDHKLNKYHDWLWENHEKLSLS

SEQ ID NO: 1083 - protein, 1953 aa, synthetic construct
  REGION 1..1953: note = Description of Artificial Sequence: Synthetic polypeptide
MGTPKKKRKVMDKKYSIGLAIGTNSVGWAVITDEYKVPSKKFKVLGNTDRHSIKKNLIGALLFDSGETAEATRLKRTARRRYTRRKNRICYLQEIFSNEMAKVDDSFFHRLEESFLVEEDKKHERHPIFGNIVDEVAYHEKYPTIYHLRKKLVDSTDKADLRLIYLALAHMIKFRGHFLIEGDLNPDNSDVDKLFIQLVQTYNQLFEENPINASGVDAKAILSARLSKSRRLENLIAQLPGEKKNGLFGNLIALSLGLTPNFKSNFDLAEDAKLQLSKDTYDDDLDNLLAQIGDQYADLFLAAKNLSDAILLSDILRVNTEITKAPLSASMIKRYDEHHQDLTLLKALVRQQLPEKYKEIFFDQSKNGYAGYIDGGASQEEFYKFIKPILEKMDGTEELLVKLNREDLLRKQRTFDNGSIPHQIHLGELHAILRRQEDFYPFLKDNREKIEKILTFRIPYYVGPLARGNSRFAWMTRKSEETITPWNFEEVVDKGASAQSFIERMTNFDKNLPNEKVLPKHSLLYEYFTVYNELTKVKYVTEGMRKPAFLSGEQKKAIVDLLFKTNRKVTVKQLKEDYFKKIECFDSVEISGVEDRFNASLGTYHDLLKIIKDKDFLDNEENEDILEDIVLTLTLFEDREMIEERLKTYAHLFDDKVMKQLKRRRYTGWGRLSRKLINGIRDKQSGKTILDFLKSDGFANRNFMQLIHDDSLTFKEDIQKAQVSGQGDSLHEHIANLAGSPAIKKGILQTVKVVDELVKVMGRHKPENIVIEMARENQTTQKGQKNSRERMKRIEEGIKELGSQILKEHPVENTQLQNEKLYLYYLQNGRDMYVDQELDINRLSDYDVDAIVPQSFLKDDSIDNKVLTRSDKNRGKSDNVPSEEVVKKMKNYWRQLLNAKLITQRKFDNLTKAERGGLSELDKAGFIKRQLVETRQITKHVAQILDSRMNTKYDENDKLIREVKVITLKSKLVSDFRKDFQFYKVREINNYHHAHDAYLNAVVGTALIKKYPKLESEFVYGDYKVYDVRKMIAKSEQEIGKATAKYFFYSNIMNFFKTEITLANGEIRKRPLIETNGETGEIVWDKGRDFATVRKVLSMPQVNIVKKTEVQTGGFSKESILPKRNSDKLIARKKDWDPKKYGGFDSPTVAYSVLVVAKVEKGKSKKLKSVKELLGITIMERSSFEKNPIDFLEAKGYKEVKKDLIIKLPKYSLFELENGRKRMLASAGELQKGNELALPSKYVNFLYLASHYEKLKGSPEDNEQKQLFVEQHKHYLDEIIEQISEFSKRVILADANLDKVLSAYNKHRDKPIREQAENIIHLFTLTNLGAPAAFKYFDTTIDRKRYTSTKEVLDATLIHQSITGLYETRIDLSQLGGDPKKKRKVGGPSSGAPPPSGGSPAGSPTSTEEGTSESATPESGPGTSTEPSEGSAPGSPAGSPTSTEEGTSTEPSEGSAPGTSTEPSETGMVAGMLGLREEKSEDQDLQGLKDKPLKFKKVKKDKKEEKEGKHEPVQPSAHHSAEPAEAGKAETSEGSGSAPAVPEASASPKQRRSIIRDRGPMYDDPTLPEGWTRKLKQRKSGRSAGKYDVYLINPQGKAFRSKVELIAYFEKVGDTSLDPNDFDFTVTGRGSPSRREQKPPKKPKSPKAPGTGRGRGRPKGSGTTRPKAATSEGVQVKRVLEKSPGKLLVKMPFQTSPGGKAEGGGATTSTQVMVIKRPGRKRKAEADPQAIPKKRGRKPGSVVAAAAAEAKKKAVKESSIRSVQETVLPIKKRKTRETVSIEVKEVVKPLLVSTLGEKSGKGLKTCKSPGRKSKESSPKGRSSSASSPPKKEHHHHHHHSESPKAPVPLLPPLPPPPPEPESSEDPTSPPEPQDLSSSVCKEEKMPRGGSLESDGCPKEPAKTQPAVATAATAAEKYKHRGEGERKDIVSSSMPRPNREEPVDSRTPVTERVS

SEQ ID NO: 1084 - protein, 2302 aa, synthetic construct
  REGION 1..2302: note = Description of Artificial Sequence: Synthetic polypeptide
MGTPKKKRKVMDKKYSIGLAIGTNSVGWAVITDEYKVPSKKFKVLGNTDRHSIKKNLIGALLFDSGETAEATRLKRTARRRYTRRKNRICYLQEIFSNEMAKVDDSFFHRLEESFLVEEDKKHERHPIFGNIVDEVAYHEKYPTIYHLRKKLVDSTDKADLRLIYLALAHMIKFRGHFLIEGDLNPDNSDVDKLFIQLVQTYNQLFEENPINASGVDAKAILSARLSKSRRLENLIAQLPGEKKNGLFGNLIALSLGLTPNFKSNFDLAEDAKLQLSKDTYDDDLDNLLAQIGDQYADLFLAAKNLSDAILLSDILRVNTEITKAPLSASMIKRYDEHHQDLTLLKALVRQQLPEKYKEIFFDQSKNGYAGYIDGGASQEEFYKFIKPILEKMDGTEELLVKLNREDLLRKQRTFDNGSIPHQIHLGELHAILRRQEDFYPFLKDNREKIEKILTFRIPYYVGPLARGNSRFAWMTRKSEETITPWNFEEVVDKGASAQSFIERMTNFDKNLPNEKVLPKHSLLYEYFTVYNELTKVKYVTEGMRKPAFLSGEQKKAIVDLLFKTNRKVTVKQLKEDYFKKIECFDSVEISGVEDRFNASLGTYHDLLKIIKDKDFLDNEENEDILEDIVLTLTLFEDREMIEERLKTYAHLFDDKVMKQLKRRRYTGWGRLSRKLINGIRDKQSGKTILDFLKSDGFANRNFMQLIHDDSLTFKEDIQKAQVSGQGDSLHEHIANLAGSPAIKKGILQTVKVVDELVKVMGRHKPENIVIEMARENQTTQKGQKNSRERMKRIEEGIKELGSQILKEHPVENTQLQNEKLYLYYLQNGRDMYVDQELDINRLSDYDVDAIVPQSFLKDDSIDNKVLTRSDKNRGKSDNVPSEEVVKKMKNYWRQLLNAKLITQRKFDNLTKAERGGLSELDKAGFIKRQLVETRQITKHVAQILDSRMNTKYDENDKLIREVKVITLKSKLVSDFRKDFQFYKVREINNYHHAHDAYLNAVVGTALIKKYPKLESEFVYGDYKVYDVRKMIAKSEQEIGKATAKYFFYSNIMNFFKTEITLANGEIRKRPLIETNGETGEIVWDKGRDFATVRKVLSMPQVNIVKKTEVQTGGFSKESILPKRNSDKLIARKKDWDPKKYGGFDSPTVAYSVLVVAKVEKGKSKKLKSVKELLGITIMERSSFEKNPIDFLEAKGYKEVKKDLIIKLPKYSLFELENGRKRMLASAGELQKGNELALPSKYVNFLYLASHYEKLKGSPEDNEQKQLFVEQHKHYLDEIIEQISEFSKRVILADANLDKVLSAYNKHRDKPIREQAENIIHLFTLTNLGAPAAFKYFDTTIDRKRYTSTKEVLDATLIHQSITGLYETRIDLSQLGGDPKKKRKVGGPSSGAPPPSGGSPAGSPTSTEEGTSESATPESGPGTSTEPSEGSAPGSPAGSPTSTEEGTSTEPSEGSAPGTSTEPSETGMAASAAAASAAAASAASGSPGPGEGSAGGEKRSTAPSAAASASASAAASSPAGGGAEALELLEHCGVCRERLRPEREPRLLPCLHSACSACLGPAAPAAANSSGDGGAAGDGTVVDCPVCKQQCFSKDIVENYFMRDSGSKAATDAQDANQCCTSCEDNAPATSYCVECSEPLCETCVEAHQRVKYTKDHTVRSTGPAKSRDGERTVYCNVHKHEPLVLFCESCDTLTCRDCQLNAHKDHQYQFLEDAVRNQRKLLASLVKRLGDKHATLQKSTKEVRSSIRQVSDVQKRVQVDVKMAILQIMKELNKRGRVLVNDAQKVTEGQQERLERQHWTMTKIQKHQEHILRFASWALESDNNTALLLSKKLIYFQLHRALKMIVDPVEPHGEMKFQWDLNAWTKSAEAFGKIVAERPGTNSTGPAPMAPPRAPGPLSKQGSGSSQPMEVQEGYGFGSGDDPYSSAEPHVSGVKRSRSGEGEVSGLMRKVPRVSLERLDLDLTADSQPPVFKVFPGSTTEDYNLIVIERGAAAAATGQPGTAPAGTPGAPPLAGMAIVKEEETEAAIGAPPTATEGPETKPVLMALAEGPGAEGPRLASPSGSTSSGLEVVAPEGTSAPGGGPGTLDDSATICRVCQKPGDLVMCNQCEFCFHLDCHLPALQDVPGEEWSCSLCHVLPDLKEEDGSLSLDGADSTGVVAKLSPANQRKCERVLLALFCHEPCRPLHQLATDSTFSLDQPGGTLDLTLIRARLQEKLSPPYSSPQEFAQDVGRMFKQFNKLTEDKADVQSIIGLQRFFETRMNEAFGDTKFSAVLVEPPPMSLPGAGLSSQELSGGPGDGP

SEQ ID NO: 1085 - protein, 1658 aa, synthetic construct
  REGION 1..1658: note = Description of Artificial Sequence: Synthetic polypeptide
MGTPKKKRKVMDKKYSIGLAIGTNSVGWAVITDEYKVPSKKFKVLGNTDRHSIKKNLIGALLFDSGETAEATRLKRTARRRYTRRKNRICYLQEIFSNEMAKVDDSFFHRLEESFLVEEDKKHERHPIFGNIVDEVAYHEKYPTIYHLRKKLVDSTDKADLRLIYLALAHMIKFRGHFLIEGDLNPDNSDVDKLFIQLVQTYNQLFEENPINASGVDAKAILSARLSKSRRLENLIAQLPGEKKNGLFGNLIALSLGLTPNFKSNFDLAEDAKLQLSKDTYDDDLDNLLAQIGDQYADLFLAAKNLSDAILLSDILRVNTEITKAPLSASMIKRYDEHHQDLTLLKALVRQQLPEKYKEIFFDQSKNGYAGYIDGGASQEEFYKFIKPILEKMDGTEELLVKLNREDLLRKQRTFDNGSIPHQIHLGELHAILRRQEDFYPFLKDNREKIEKILTFRIPYYVGPLARGNSRFAWMTRKSEETITPWNFEEVVDKGASAQSFIERMTNFDKNLPNEKVLPKHSLLYEYFTVYNELTKVKYVTEGMRKPAFLSGEQKKAIVDLLFKTNRKVTVKQLKEDYFKKIECFDSVEISGVEDRFNASLGTYHDLLKIIKDKDFLDNEENEDILEDIVLTLTLFEDREMIEERLKTYAHLFDDKVMKQLKRRRYTGWGRLSRKLINGIRDKQSGKTILDFLKSDGFANRNFMQLIHDDSLTFKEDIQKAQVSGQGDSLHEHIANLAGSPAIKKGILQTVKVVDELVKVMGRHKPENIVIEMARENQTTQKGQKNSRERMKRIEEGIKELGSQILKEHPVENTQLQNEKLYLYYLQNGRDMYVDQELDINRLSDYDVDAIVPQSFLKDDSIDNKVLTRSDKNRGKSDNVPSEEVVKKMKNYWRQLLNAKLITQRKFDNLTKAERGGLSELDKAGFIKRQLVETRQITKHVAQILDSRMNTKYDENDKLIREVKVITLKSKLVSDFRKDFQFYKVREINNYHHAHDAYLNAVVGTALIKKYPKLESEFVYGDYKVYDVRKMIAKSEQEIGKATAKYFFYSNIMNFFKTEITLANGEIRKRPLIETNGETGEIVWDKGRDFATVRKVLSMPQVNIVKKTEVQTGGFSKESILPKRNSDKLIARKKDWDPKKYGGFDSPTVAYSVLVVAKVEKGKSKKLKSVKELLGITIMERSSFEKNPIDFLEAKGYKEVKKDLIIKLPKYSLFELENGRKRMLASAGELQKGNELALPSKYVNFLYLASHYEKLKGSPEDNEQKQLFVEQHKHYLDEIIEQISEFSKRVILADANLDKVLSAYNKHRDKPIREQAENIIHLFTLTNLGAPAAFKYFDTTIDRKRYTSTKEVLDATLIHQSITGLYETRIDLSQLGGDPKKKRKVGGPSSGAPPPSGGSPAGSPTSTEEGTSESATPESGPGTSTEPSEGSAPGSPAGSPTSTEEGTSTEPSEGSAPGTSTEPSETGMGKKTKRTADSSSSEDEEEYVVEKVLDRRVVKGQVEYLLKWKGFSEEHNTWEPEKNLDCPELISEFMKKYKKMKEGENNKPREKSESNKRKSNFSNSADDIKSKKKREQSNDIARGFERGLEPEKIIGATDSCGDLMFLMKWKGTDEADLVLAKEANVKCPQIVIAFYEERLTWHAYPEDAENKEKETAKS

SEQ ID NO: 1086 - protein, 1652 aa, synthetic construct
  REGION 1..1652: note = Description of Artificial Sequence: Synthetic polypeptide
MGTPKKKRKVMDKKYSIGLAIGTNSVGWAVITDEYKVPSKKFKVLGNTDRHSIKKNLIGALLFDSGETAEATRLKRTARRRYTRRKNRICYLQEIFSNEMAKVDDSFFHRLEESFLVEEDKKHERHPIFGNIVDEVAYHEKYPTIYHLRKKLVDSTDKADLRLIYLALAHMIKFRGHFLIEGDLNPDNSDVDKLFIQLVQTYNQLFEENPINASGVDAKAILSARLSKSRRLENLIAQLPGEKKNGLFGNLIALSLGLTPNFKSNFDLAEDAKLQLSKDTYDDDLDNLLAQIGDQYADLFLAAKNLSDAILLSDILRVNTEITKAPLSASMIKRYDEHHQDLTLLKALVRQQLPEKYKEIFFDQSKNGYAGYIDGGASQEEFYKFIKPILEKMDGTEELLVKLNREDLLRKQRTFDNGSIPHQIHLGELHAILRRQEDFYPFLKDNREKIEKILTFRIPYYVGPLARGNSRFAWMTRKSEETITPWNFEEVVDKGASAQSFIERMTNFDKNLPNEKVLPKHSLLYEYFTVYNELTKVKYVTEGMRKPAFLSGEQKKAIVDLLFKTNRKVTVKQLKEDYFKKIECFDSVEISGVEDRFNASLGTYHDLLKIIKDKDFLDNEENEDILEDIVLTLTLFEDREMIEERLKTYAHLFDDKVMKQLKRRRYTGWGRLSRKLINGIRDKQSGKTILDFLKSDGFANRNFMQLIHDDSLTFKEDIQKAQVSGQGDSLHEHIANLAGSPAIKKGILQTVKVVDELVKVMGRHKPENIVIEMARENQTTQKGQKNSRERMKRIEEGIKELGSQILKEHPVENTQLQNEKLYLYYLQNGRDMYVDQELDINRLSDYDVDAIVPQSFLKDDSIDNKVLTRSDKNRGKSDNVPSEEVVKKMKNYWRQLLNAKLITQRKFDNLTKAERGGLSELDKAGFIKRQLVETRQITKHVAQILDSRMNTKYDENDKLIREVKVITLKSKLVSDFRKDFQFYKVREINNYHHAHDAYLNAVVGTALIKKYPKLESEFVYGDYKVYDVRKMIAKSEQEIGKATAKYFFYSNIMNFFKTEITLANGEIRKRPLIETNGETGEIVWDKGRDFATVRKVLSMPQVNIVKKTEVQTGGFSKESILPKRNSDKLIARKKDWDPKKYGGFDSPTVAYSVLVVAKVEKGKSKKLKSVKELLGITIMERSSFEKNPIDFLEAKGYKEVKKDLIIKLPKYSLFELENGRKRMLASAGELQKGNELALPSKYVNFLYLASHYEKLKGSPEDNEQKQLFVEQHKHYLDEIIEQISEFSKRVILADANLDKVLSAYNKHRDKPIREQAENIIHLFTLTNLGAPAAFKYFDTTIDRKRYTSTKEVLDATLIHQSITGLYETRIDLSQLGGDPKKKRKVGGPSSGAPPPSGGSPAGSPTSTEEGTSESATPESGPGTSTEPSEGSAPGSPAGSPTSTEEGTSTEPSEGSAPGTSTEPSETGMGKKQNKKKVEEVLEEEEEEYVVEKVLDRRVVKGKVEYLLKWKGFSDEDNTWEPEENLDCPDLIAEFLQSQKTAHETDKSEGGKRKADSDSEDKGEESKPKKKKEESEKPRGFARGLEPERIIGATDSSGELMFLMKWKNSDEADLVPAKEANVKCPQVVISFYEERLTWHSYPSEDDDKKDDKN

SEQ ID NO: 1087 - protein, 1650 aa, synthetic construct
  REGION 1..1650: note = Description of Artificial Sequence: Synthetic polypeptide
MGTPKKKRKVMDKKYSIGLAIGTNSVGWAVITDEYKVPSKKFKVLGNTDRHSIKKNLIGALLFDSGETAEATRLKRTARRRYTRRKNRICYLQEIFSNEMAKVDDSFFHRLEESFLVEEDKKHERHPIFGNIVDEVAYHEKYPTIYHLRKKLVDSTDKADLRLIYLALAHMIKFRGHFLIEGDLNPDNSDVDKLFIQLVQTYNQLFEENPINASGVDAKAILSARLSKSRRLENLIAQLPGEKKNGLFGNLIALSLGLTPNFKSNFDLAEDAKLQLSKDTYDDDLDNLLAQIGDQYADLFLAAKNLSDAILLSDILRVNTEITKAPLSASMIKRYDEHHQDLTLLKALVRQQLPEKYKEIFFDQSKNGYAGYIDGGASQEEFYKFIKPILEKMDGTEELLVKLNREDLLRKQRTFDNGSIPHQIHLGELHAILRRQEDFYPFLKDNREKIEKILTFRIPYYVGPLARGNSRFAWMTRKSEETITPWNFEEVVDKGASAQSFIERMTNFDKNLPNEKVLPKHSLLYEYFTVYNELTKVKYVTEGMRKPAFLSGEQKKAIVDLLFKTNRKVTVKQLKEDYFKKIECFDSVEISGVEDRFNASLGTYHDLLKIIKDKDFLDNEENEDILEDIVLTLTLFEDREMIEERLKTYAHLFDDKVMKQLKRRRYTGWGRLSRKLINGIRDKQSGKTILDFLKSDGFANRNFMQLIHDDSLTFKEDIQKAQVSGQGDSLHEHIANLAGSPAIKKGILQTVKVVDELVKVMGRHKPENIVIEMARENQTTQKGQKNSRERMKRIEEGIKELGSQILKEHPVENTQLQNEKLYLYYLQNGRDMYVDQELDINRLSDYDVDAIVPQSFLKDDSIDNKVLTRSDKNRGKSDNVPSEEVVKKMKNYWRQLLNAKLITQRKFDNLTKAERGGLSELDKAGFIKRQLVETRQITKHVAQILDSRMNTKYDENDKLIREVKVITLKSKLVSDFRKDFQFYKVREINNYHHAHDAYLNAVVGTALIKKYPKLESEFVYGDYKVYDVRKMIAKSEQEIGKATAKYFFYSNIMNFFKTEITLANGEIRKRPLIETNGETGEIVWDKGRDFATVRKVLSMPQVNIVKKTEVQTGGFSKESILPKRNSDKLIARKKDWDPKKYGGFDSPTVAYSVLVVAKVEKGKSKKLKSVKELLGITIMERSSFEKNPIDFLEAKGYKEVKKDLIIKLPKYSLFELENGRKRMLASAGELQKGNELALPSKYVNFLYLASHYEKLKGSPEDNEQKQLFVEQHKHYLDEIIEQISEFSKRVILADANLDKVLSAYNKHRDKPIREQAENIIHLFTLTNLGAPAAFKYFDTTIDRKRYTSTKEVLDATLIHQSITGLYETRIDLSQLGGDPKKKRKVGGPSSGAPPPSGGSPAGSPTSTEEGTSESATPESGPGTSTEPSEGSAPGSPAGSPTSTEEGTSTEPSEGSAPGTSTEPSETGMASNKTTLQKMGKKQNGKSKKVEEAEPEEFVVEKVLDRRVVNGKVEYFLKWKGFTDADNTWEPEENLDCPELIEAFLNSQKAGKEKDGTKRKSLSDSESDDSKSKKKRDAADKPRGFARGLDPERIIGATDSSGELMFLMKWKDSDEADLVLAKEANMKCPQIVIAFYEERLTWHSCPEDEAQ

SEQ ID NO: 1088 - protein, 2186 aa, synthetic construct
  REGION 1..2186: note = Description of Artificial Sequence: Synthetic polypeptide
MGTPKKKRKVMDKKYSIGLAIGTNSVGWAVITDEYKVPSKKFKVLGNTDRHSIKKNLIGALLFDSGETAEATRLKRTARRRYTRRKNRICYLQEIFSNEMAKVDDSFFHRLEESFLVEEDKKHERHPIFGNIVDEVAYHEKYPTIYHLRKKLVDSTDKADLRLIYLALAHMIKFRGHFLIEGDLNPDNSDVDKLFIQLVQTYNQLFEENPINASGVDAKAILSARLSKSRRLENLIAQLPGEKKNGLFGNLIALSLGLTPNFKSNFDLAEDAKLQLSKDTYDDDLDNLLAQIGDQYADLFLAAKNLSDAILLSDILRVNTEITKAPLSASMIKRYDEHHQDLTLLKALVRQQLPEKYKEIFFDQSKNGYAGYIDGGASQEEFYKFIKPILEKMDGTEELLVKLNREDLLRKQRTFDNGSIPHQIHLGELHAILRRQEDFYPFLKDNREKIEKILTFRIPYYVGPLARGNSRFAWMTRKSEETITPWNFEEVVDKGASAQSFIERMTNFDKNLPNEKVLPKHSLLYEYFTVYNELTKVKYVTEGMRKPAFLSGEQKKAIVDLLFKTNRKVTVKQLKEDYFKKIECFDSVEISGVEDRFNASLGTYHDLLKIIKDKDFLDNEENEDILEDIVLTLTLFEDREMIEERLKTYAHLFDDKVMKQLKRRRYTGWGRLSRKLINGIRDKQSGKTILDFLKSDGFANRNFMQLIHDDSLTFKEDIQKAQVSGQGDSLHEHIANLAGSPAIKKGILQTVKVVDELVKVMGRHKPENIVIEMARENQTTQKGQKNSRERMKRIEEGIKELGSQILKEHPVENTQLQNEKLYLYYLQNGRDMYVDQELDINRLSDYDVDAIVPQSFLKDDSIDNKVLTRSDKNRGKSDNVPSEEVVKKMKNYWRQLLNAKLITQRKFDNLTKAERGGLSELDKAGFIKRQLVETRQITKHVAQILDSRMNTKYDENDKLIREVKVITLKSKLVSDFRKDFQFYKVREINNYHHAHDAYLNAVVGTALIKKYPKLESEFVYGDYKVYDVRKMIAKSEQEIGKATAKYFFYSNIMNFFKTEITLANGEIRKRPLIETNGETGEIVWDKGRDFATVRKVLSMPQVNIVKKTEVQTGGFSKESILPKRNSDKLIARKKDWDPKKYGGFDSPTVAYSVLVVAKVEKGKSKKLKSVKELLGITIMERSSFEKNPIDFLEAKGYKEVKKDLIIKLPKYSLFELENGRKRMLASAGELQKGNELALPSKYVNFLYLASHYEKLKGSPEDNEQKQLFVEQHKHYLDEIIEQISEFSKRVILADANLDKVLSAYNKHRDKPIREQAENIIHLFTLTNLGAPAAFKYFDTTIDRKRYTSTKEVLDATLIHQSITGLYETRIDLSQLGGDPKKKRKVGGPSSGAPPPSGGSPAGSPTSTEEGTSESATPESGPGTSTEPSEGSAPGSPAGSPTSTEEGTSTEPSEGSAPGTSTEPSETGMGEKNGDAKTFWMELEDDGKVDFIFEQVQNVLQSLKQKIKDGSATNKEYIQAMILVNEATIINSSTSIKGASQKEVNAQSSDPMPVTQKEQENKSNAFPSTSCENSFPEDCTFLTTENKEILSLEDKVVDFREKDSSSNLSYQSHDCSGACLMKMPLNLKGENPLQLPIKCHFQRRHAKTNSHSSALHVSYKTPCGRSLRNVEEVFRYLLETECNFLFTDNFSFNTYVQLARNYPKQKEVVSDVDISNGVESVPISFCNEIDSRKLPQFKYRKTVWPRAYNLTNFSSMFTDSCDCSEGCIDITKCACLQLTARNAKTSPLSSDKITTGYKYKRLQRQIPTGIYECSLLCKCNRQLCQNRVVQHGPQVRLQVFKTEQKGWGVRCLDDIDRGTFVCIYSGRLLSRANTEKSYGIDENGRDENTMKNIFSKKRKLEVACSDCEVEVLPLGLETHPRTAKTEKCPPKFSNNPKELTVETKYDNISRIQYHSVIRDPESKTAIFQHNGKKMEFVSSESVTPEDNDGFKPPREHLNSKTKGAQKDSSSNHVDEFEDNLLIESDVIDITKYREETPPRSRCNQATTLDNQNIKKAIEVQIQKPQEGRSTACQRQQVFCDEELLSETKNTSSDSLTKFNKGNVFLLDATKEGNVGRFLNHSCCPNLLVQNVFVETHNRNFPLVAFFTNRYVKARTELTWDYGYEAGTVPEKEIFCQCGVNKCRKKIL

SEQ ID NO: 1089 - protein, 1879 aa, synthetic construct
  REGION 1..1879: note = Description of Artificial Sequence: Synthetic polypeptide
MGTPKKKRKVMDKKYSIGLAIGTNSVGWAVITDEYKVPSKKFKVLGNTDRHSIKKNLIGALLFDSGETAEATRLKRTARRRYTRRKNRICYLQEIFSNEMAKVDDSFFHRLEESFLVEEDKKHERHPIFGNIVDEVAYHEKYPTIYHLRKKLVDSTDKADLRLIYLALAHMIKFRGHFLIEGDLNPDNSDVDKLFIQLVQTYNQLFEENPINASGVDAKAILSARLSKSRRLENLIAQLPGEKKNGLFGNLIALSLGLTPNFKSNFDLAEDAKLQLSKDTYDDDLDNLLAQIGDQYADLFLAAKNLSDAILLSDILRVNTEITKAPLSASMIKRYDEHHQDLTLLKALVRQQLPEKYKEIFFDQSKNGYAGYIDGGASQEEFYKFIKPILEKMDGTEELLVKLNREDLLRKQRTFDNGSIPHQIHLGELHAILRRQEDFYPFLKDNREKIEKILTFRIPYYVGPLARGNSRFAWMTRKSEETITPWNFEEVVDKGASAQSFIERMTNFDKNLPNEKVLPKHSLLYEYFTVYNELTKVKYVTEGMRKPAFLSGEQKKAIVDLLFKTNRKVTVKQLKEDYFKKIECFDSVEISGVEDRFNASLGTYHDLLKIIKDKDFLDNEENEDILEDIVLTLTLFEDREMIEERLKTYAHLFDDKVMKQLKRRRYTGWGRLSRKLINGIRDKQSGKTILDFLKSDGFANRNFMQLIHDDSLTFKEDIQKAQVSGQGDSLHEHIANLAGSPAIKKGILQTVKVVDELVKVMGRHKPENIVIEMARENQTTQKGQKNSRERMKRIEEGIKELGSQILKEHPVENTQLQNEKLYLYYLQNGRDMYVDQELDINRLSDYDVDAIVPQSFLKDDSIDNKVLTRSDKNRGKSDNVPSEEVVKKMKNYWRQLLNAKLITQRKFDNLTKAERGGLSELDKAGFIKRQLVETRQITKHVAQILDSRMNTKYDENDKLIREVKVITLKSKLVSDFRKDFQFYKVREINNYHHAHDAYLNAVVGTALIKKYPKLESEFVYGDYKVYDVRKMIAKSEQEIGKATAKYFFYSNIMNFFKTEITLANGEIRKRPLIETNGETGEIVWDKGRDFATVRKVLSMPQVNIVKKTEVQTGGFSKESILPKRNSDKLIARKKDWDPKKYGGFDSPTVAYSVLVVAKVEKGKSKKLKSVKELLGITIMERSSFEKNPIDFLEAKGYKEVKKDLIIKLPKYSLFELENGRKRMLASAGELQKGNELALPSKYVNFLYLASHYEKLKGSPEDNEQKQLFVEQHKHYLDEIIEQISEFSKRVILADANLDKVLSAYNKHRDKPIREQAENIIHLFTLTNLGAPAAFKYFDTTIDRKRYTSTKEVLDATLIHQSITGLYETRIDLSQLGGDPKKKRKVGGPSSGAPPPSGGSPAGSPTSTEEGTSESATPESGPGTSTEPSEGSAPGSPAGSPTSTEEGTSTEPSEGSAPGTSTEPSETGMAENLKGCSVCCKSSWNQLQDLCRLAKLSCPALGISKRNLYDFEVEYLCDYKKIREQEYYLVKWRGYPDSESTWEPRQNLKCVRILKQFHKDLERELLRRHHRSKTPRHLDPSLANYLVQKAKQRRALRRWEQELNAKRSHLGRITVENEVDLDGPPRAFVYINEYRVGEGITLNQVAVGCECQDCLWAPTGGCCPGASLHKFAYNDQGQVRLRAGLPIYECNSRCRCGYDCPNRVVQKGIRYDLCIFRTDDGRGWGVRTLEKIRKNSFVMEYVGEIITSEEAERRGQIYDRQGATYLFDLDYVEDVYTVDAAYYGNISHFVNHSCDPNLQVYNVFIDNLDERLPRIAFFATRTIRAGEELTFDYNMQVDPVDMESTRMDSNFGLAGLPGSPKKRVRIECKCGTESCRKYLF

SEQ ID NO: 1090 - protein, 1879 aa, synthetic construct
  REGION 1..1879: note = Description of Artificial Sequence: Synthetic polypeptide
MGTPKKKRKVMDKKYSIGLAIGTNSVGWAVITDEYKVPSKKFKVLGNTDRHSIKKNLIGALLFDSGETAEATRLKRTARRRYTRRKNRICYLQEIFSNEMAKVDDSFFHRLEESFLVEEDKKHERHPIFGNIVDEVAYHEKYPTIYHLRKKLVDSTDKADLRLIYLALAHMIKFRGHFLIEGDLNPDNSDVDKLFIQLVQTYNQLFEENPINASGVDAKAILSARLSKSRRLENLIAQLPGEKKNGLFGNLIALSLGLTPNFKSNFDLAEDAKLQLSKDTYDDDLDNLLAQIGDQYADLFLAAKNLSDAILLSDILRVNTEITKAPLSASMIKRYDEHHQDLTLLKALVRQQLPEKYKEIFFDQSKNGYAGYIDGGASQEEFYKFIKPILEKMDGTEELLVKLNREDLLRKQRTFDNGSIPHQIHLGELHAILRRQEDFYPFLKDNREKIEKILTFRIPYYVGPLARGNSRFAWMTRKSEETITPWNFEEVVDKGASAQSFIERMTNFDKNLPNEKVLPKHSLLYEYFTVYNELTKVKYVTEGMRKPAFLSGEQKKAIVDLLFKTNRKVTVKQLKEDYFKKIECFDSVEISGVEDRFNASLGTYHDLLKIIKDKDFLDNEENEDILEDIVLTLTLFEDREMIEERLKTYAHLFDDKVMKQLKRRRYTGWGRLSRKLINGIRDKQSGKTILDFLKSDGFANRNFMQLIHDDSLTFKEDIQKAQVSGQGDSLHEHIANLAGSPAIKKGILQTVKVVDELVKVMGRHKPENIVIEMARENQTTQKGQKNSRERMKRIEEGIKELGSQILKEHPVENTQLQNEKLYLYYLQNGRDMYVDQELDINRLSDYDVDAIVPQSFLKDDSIDNKVLTRSDKNRGKSDNVPSEEVVKKMKNYWRQLLNAKLITQRKFDNLTKAERGGLSELDKAGFIKRQLVETRQITKHVAQILDSRMNTKYDENDKLIREVKVITLKSKLVSDFRKDFQFYKVREINNYHHAHDAYLNAVVGTALIKKYPKLESEFVYGDYKVYDVRKMIAKSEQEIGKATAKYFFYSNIMNFFKTEITLANGEIRKRPLIETNGETGEIVWDKGRDFATVRKVLSMPQVNIVKKTEVQTGGFSKESILPKRNSDKLIARKKDWDPKKYGGFDSPTVAYSVLVVAKVEKGKSKKLKSVKELLGITIMERSSFEKNPIDFLEAKGYKEVKKDLIIKLPKYSLFELENGRKRMLASAGELQKGNELALPSKYVNFLYLASHYEKLKGSPEDNEQKQLFVEQHKHYLDEIIEQISEFSKRVILADANLDKVLSAYNKHRDKPIREQAENIIHLFTLTNLGAPAAFKYFDTTIDRKRYTSTKEVLDATLIHQSITGLYETRIDLSQLGGDPKKKRKVGGPSSGAPPPSGGSPAGSPTSTEEGTSESATPESGPGTSTEPSEGSAPGSPAGSPTSTEEGTSTEPSEGSAPGTSTEPSETGMAENLKGCSVCCKSSWNQLQDLCRLAKLSCPALGISKRNLYDFEVEYLCDYKKIREQEYYLVKWRGYPDSESTWEPRQNLKCVRILKQFHKDLERELLRRHHRSKTPRHLDPSLANYLVQKAKQRRALRRWEQELNAKRSHLGRITVENEVDLDGPPRAFVYINEYRVGEGITLNQVAVGCECQDCLWAPTGGCCPGASLHKFAYNDQGQVRLRAGLPIYECNSRCRCGYDCPNRVVQKGIRYDLCIFRTDDGRGWGVRTLEKIRKNSFVMEYVGEIITSEEAERRGQIYDRQGATYLFDLDYVEDVYTVDAAYYGNISRFVNHSCDPNLQVYNVFIDNLDERLPRIAFFATRTIRAGEELTFDYNMQVDPVDMESTRMDSNFGLAGLPGSPKKRVRIECKCGTESCRKYLF

SEQ ID NO: 1091 - protein, 1877 aa, synthetic construct
  REGION 1..1877: note = Description of Artificial Sequence: Synthetic polypeptide
MGTPKKKRKVMDKKYSIGLAIGTNSVGWAVITDEYKVPSKKFKVLGNTDRHSIKKNLIGALLFDSGETAEATRLKRTARRRYTRRKNRICYLQEIFSNEMAKVDDSFFHRLEESFLVEEDKKHERHPIFGNIVDEVAYHEKYPTIYHLRKKLVDSTDKADLRLIYLALAHMIKFRGHFLIEGDLNPDNSDVDKLFIQLVQTYNQLFEENPINASGVDAKAILSARLSKSRRLENLIAQLPGEKKNGLFGNLIALSLGLTPNFKSNFDLAEDAKLQLSKDTYDDDLDNLLAQIGDQYADLFLAAKNLSDAILLSDILRVNTEITKAPLSASMIKRYDEHHQDLTLLKALVRQQLPEKYKEIFFDQSKNGYAGYIDGGASQEEFYKFIKPILEKMDGTEELLVKLNREDLLRKQRTFDNGSIPHQIHLGELHAILRRQEDFYPFLKDNREKIEKILTFRIPYYVGPLARGNSRFAWMTRKSEETITPWNFEEVVDKGASAQSFIERMTNFDKNLPNEKVLPKHSLLYEYFTVYNELTKVKYVTEGMRKPAFLSGEQKKAIVDLLFKTNRKVTVKQLKEDYFKKIECFDSVEISGVEDRFNASLGTYHDLLKIIKDKDFLDNEENEDILEDIVLTLTLFEDREMIEERLKTYAHLFDDKVMKQLKRRRYTGWGRLSRKLINGIRDKQSGKTILDFLKSDGFANRNFMQLIHDDSLTFKEDIQKAQVSGQGDSLHEHIANLAGSPAIKKGILQTVKVVDELVKVMGRHKPENIVIEMARENQTTQKGQKNSRERMKRIEEGIKELGSQILKEHPVENTQLQNEKLYLYYLQNGRDMYVDQELDINRLSDYDVDAIVPQSFLKDDSIDNKVLTRSDKNRGKSDNVPSEEVVKKMKNYWRQLLNAKLITQRKFDNLTKAERGGLSELDKAGFIKRQLVETRQITKHVAQILDSRMNTKYDENDKLIREVKVITLKSKLVSDFRKDFQFYKVREINNYHHAHDAYLNAVVGTALIKKYPKLESEFVYGDYKVYDVRKMIAKSEQEIGKATAKYFFYSNIMNFFKTEITLANGEIRKRPLIETNGETGEIVWDKGRDFATVRKVLSMPQVNIVKKTEVQTGGFSKESILPKRNSDKLIARKKDWDPKKYGGFDSPTVAYSVLVVAKVEKGKSKKLKSVKELLGITIMERSSFEKNPIDFLEAKGYKEVKKDLIIKLPKYSLFELENGRKRMLASAGELQKGNELALPSKYVNFLYLASHYEKLKGSPEDNEQKQLFVEQHKHYLDEIIEQISEFSKRVILADANLDKVLSAYNKHRDKPIREQAENIIHLFTLTNLGAPAAFKYFDTTIDRKRYTSTKEVLDATLIHQSITGLYETRIDLSQLGGDPKKKRKVGGPSSGAPPPSGGSPAGSPTSTEEGTSESATPESGPGTSTEPSEGSAPGSPAGSPTSTEEGTSTEPSEGSAPGTSTEPSETGMAAVGAEARGAWCVPCLVSLDTLQELCRKEKLTCKSIGITKRNLNNYEVEYLCDYKVVKDMEYYLVKWKGWPDSTNTWEPLQNLKCPLLLQQFSNDKHNYLSQVKKGKAITPKDNNKTLKPAIAEYIVKKAKQRIALQRWQDELNRRKNHKGMIFVENTVDLEGPPSDFYYINEYKPAPGISLVNEATFGCSCTDCFFQKCCPAEAGVLLAYNKNQQIKIPPGTPIYECNSRCQCGPDCPNRIVQKGTQYSLCIFRTSNGRGWGVKTLVKIKRMSFVMEYVGEVITSEEAERRGQFYDNKGITYLFDLDYESDEFTVDAARYGNVSHFVNHSCDPNLQVFNVFIDNLDTRLPRIALFSTRTINAGEELTFDYQMKGSGDISSDSIDHSPAKKRVRTVCKCGAVTCRGYLN

SEQ ID NO: 1092 - protein, 2352 aa, synthetic construct
  REGION 1..2352: note = Description of Artificial Sequence: Synthetic polypeptide
MGTPKKKRKVMDKKYSIGLAIGTNSVGWAVITDEYKVPSKKFKVLGNTDRHSIKKNLIGALLFDSGETAEATRLKRTARRRYTRRKNRICYLQEIFSNEMAKVDDSFFHRLEESFLVEEDKKHERHPIFGNIVDEVAYHEKYPTIYHLRKKLVDSTDKADLRLIYLALAHMIKFRGHFLIEGDLNPDNSDVDKLFIQLVQTYNQLFEENPINASGVDAKAILSARLSKSRRLENLIAQLPGEKKNGLFGNLIALSLGLTPNFKSNFDLAEDAKLQLSKDTYDDDLDNLLAQIGDQYADLFLAAKNLSDAILLSDILRVNTEITKAPLSASMIKRYDEHHQDLTLLKALVRQQLPEKYKEIFFDQSKNGYAGYIDGGASQEEFYKFIKPILEKMDGTEELLVKLNREDLLRKQRTFDNGSIPHQIHLGELHAILRRQEDFYPFLKDNREKIEKILTFRIPYYVGPLARGNSRFAWMTRKSEETITPWNFEEVVDKGASAQSFIERMTNFDKNLPNEKVLPKHSLLYEYFTVYNELTKVKYVTEGMRKPAFLSGEQKKAIVDLLFKTNRKVTVKQLKEDYFKKIECFDSVEISGVEDRFNASLGTYHDLLKIIKDKDFLDNEENEDILEDIVLTLTLFEDREMIEERLKTYAHLFDDKVMKQLKRRRYTGWGRLSRKLINGIRDKQSGKTILDFLKSDGFANRNFMQLIHDDSLTFKEDIQKAQVSGQGDSLHEHIANLAGSPAIKKGILQTVKVVDELVKVMGRHKPENIVIEMARENQTTQKGQKNSRERMKRIEEGIKELGSQILKEHPVENTQLQNEKLYLYYLQNGRDMYVDQELDINRLSDYDVDAIVPQSFLKDDSIDNKVLTRSDKNRGKSDNVPSEEVVKKMKNYWRQLLNAKLITQRKFDNLTKAERGGLSELDKAGFIKRQLVETRQITKHVAQILDSRMNTKYDENDKLIREVKVITLKSKLVSDFRKDFQFYKVREINNYHHAHDAYLNAVVGTALIKKYPKLESEFVYGDYKVYDVRKMIAKSEQEIGKATAKYFFYSNIMNFFKTEITLANGEIRKRPLIETNGETGEIVWDKGRDFATVRKVLSMPQVNIVKKTEVQTGGFSKESILPKRNSDKLIARKKDWDPKKYGGFDSPTVAYSVLVVAKVEKGKSKKLKSVKELLGITIMERSSFEKNPIDFLEAKGYKEVKKDLIIKLPKYSLFELENGRKRMLASAGELQKGNELALPSKYVNFLYLASHYEKLKGSPEDNEQKQLFVEQHKHYLDEIIEQISEFSKRVILADANLDKVLSAYNKHRDKPIREQAENIIHLFTLTNLGAPAAFKYFDTTIDRKRYTSTKEVLDATLIHQSITGLYETRIDLSQLGGDPKKKRKVGGPSSGAPPPSGGSPAGSPTSTEEGTSESATPESGPGTSTEPSEGSAPGSPAGSPTSTEEGTSTEPSEGSAPGTSTEPSETGMKWLGESKNMVVNGRRNGGKLSNDHQQNQSKLQHTGKDTLKAGKNAVERRSNRCNGNSGFEGQSRYVPSSGMSAKELCENDDLATSLVLDPYLGFQTHKMNTSAFPSRSSRHFSKSDSFSHNNPVRFRPIKGRQEELKEVIERFKKDEHLEKAFKCLTSGEWARHYFLNKNKMQEKLFKEHVFIYLRMFATDSGFEILPCNRYSSEQNGAKIVATKEWKRNDKIELLVGCIAELSEIEENMLLRHGENDFSVMYSTRKNCAQLWLGPAAFINHDCRPNCKFVSTGRDTACVKALRDIEPGEEISCYYGDGFFGENNEFCECYTCERRGTGAFKSRVGLPAPAPVINSKYGLRETDKRLNRLKKLGDSSKNSDSQSVSSNTDADTTQEKNNATSNRKSSVGVKKNSKSRTLTRQSMSRIPASSNSTSSKLTHINNSRVPKKLKKPAKPLLSKIKLRNHCKRLEQKNASRKLEMGNLVLKEPKVVLYKNLPIKKDKEPEGPAQAAVASGCLTRHAAREHRQNPVRGAHSQGESSPCTYITRRSVRTRTNLKEASDIKLEPNTLNGYKSSVTEPCPDSGEQLQPAPVLQEEELAHETAQKGEAKCHKSDTGMSKKKSRQGKLVKQFAKIEESTPVHDSPGKDDAVPDLMGPHSDQGEHSGTVGVPVSYTDCAPSPVGCSVVTSDSFKTKDSFRTAKSKKKRRITRYDAQLILENNSGIPKLTLRRRHDSSSKTNDQENDGMNSSKISIKLSKDHDNDNNLYVAKLNNGFNSGSGSSSTKLKIQLKRDEENRGSYTEGLHENGVCCSDPLSLLESRMEVDDYSQYEEESTDDSSSSEGDEEEDDYDDDFEDDFIPLPPAKRLRLIVGKDSIDIDISSRRREDQSLRLNA

SEQ ID NO: 1093 - protein, 1929 aa, synthetic construct
  REGION 1..1929: note = Description of Artificial Sequence: Synthetic polypeptide
MGTPKKKRKVMDKKYSIGLAIGTNSVGWAVITDEYKVPSKKFKVLGNTDRHSIKKNLIGALLFDSGETAEATRLKRTARRRYTRRKNRICYLQEIFSNEMAKVDDSFFHRLEESFLVEEDKKHERHPIFGNIVDEVAYHEKYPTIYHLRKKLVDSTDKADLRLIYLALAHMIKFRGHFLIEGDLNPDNSDVDKLFIQLVQTYNQLFEENPINASGVDAKAILSARLSKSRRLENLIAQLPGEKKNGLFGNLIALSLGLTPNFKSNFDLAEDAKLQLSKDTYDDDLDNLLAQIGDQYADLFLAAKNLSDAILLSDILRVNTEITKAPLSASMIKRYDEHHQDLTLLKALVRQQLPEKYKEIFFDQSKNGYAGYIDGGASQEEFYKFIKPILEKMDGTEELLVKLNREDLLRKQRTFDNGSIPHQIHLGELHAILRRQEDFYPFLKDNREKIEKILTFRIPYYVGPLARGNSRFAWMTRKSEETITPWNFEEVVDKGASAQSFIERMTNFDKNLPNEKVLPKHSLLYEYFTVYNELTKVKYVTEGMRKPAFLSGEQKKAIVDLLFKTNRKVTVKQLKEDYFKKIECFDSVEISGVEDRFNASLGTYHDLLKIIKDKDFLDNEENEDILEDIVLTLTLFEDREMIEERLKTYAHLFDDKVMKQLKRRRYTGWGRLSRKLINGIRDKQSGKTILDFLKSDGFANRNFMQLIHDDSLTFKEDIQKAQVSGQGDSLHEHIANLAGSPAIKKGILQTVKVVDELVKVMGRHKPENIVIEMARENQTTQKGQKNSRERMKRIEEGIKELGSQILKEHPVENTQLQNEKLYLYYLQNGRDMYVDQELDINRLSDYDVDAIVPQSFLKDDSIDNKVLTRSDKNRGKSDNVPSEEVVKKMKNYWRQLLNAKLITQRKFDNLTKAERGGLSELDKAGFIKRQLVETRQITKHVAQILDSRMNTKYDENDKLIREVKVITLKSKLVSDFRKDFQFYKVREINNYHHAHDAYLNAVVGTALIKKYPKLESEFVYGDYKVYDVRKMIAKSEQEIGKATAKYFFYSNIMNFFKTEITLANGEIRKRPLIETNGETGEIVWDKGRDFATVRKVLSMPQVNIVKKTEVQTGGFSKESILPKRNSDKLIARKKDWDPKKYGGFDSPTVAYSVLVVAKVEKGKSKKLKSVKELLGITIMERSSFEKNPIDFLEAKGYKEVKKDLIIKLPKYSLFELENGRKRMLASAGELQKGNELALPSKYVNFLYLASHYEKLKGSPEDNEQKQLFVEQHKHYLDEIIEQISEFSKRVILADANLDKVLSAYNKHRDKPIREQAENIIHLFTLTNLGAPAAFKYFDTTIDRKRYTSTKEVLDATLIHQSITGLYETRIDLSQLGGDPKKKRKVGGPSSGAPPPSGGSPAGSPTSTEEGTSESATPESGPGTSTEPSEGSAPGSPAGSPTSTEEGTSTEPSEGSAPGTSTEPSETGMGPDRVTARELCENDDLATSLVLDPYLGFRTHKMNVSPVPPLRRQQHLRSALETFLRQRDLEAAYRALTLGGWTARYFQSRGPRQEAALKTHVYRYLRAFLPESGFTILPCTRYSMETNGAKIVSTRAWKKNEKLELLVGCIAELREADEGLLRAGENDFSIMYSTRKRSAQLWLGPAAFINHDCKPNCKFVPADGNAACVKVLRDIEPGDEVTCFYGEGFFGEKNEHCECHTCERKGEGAFRTRPREPALPPRPLDKYQLRETKRRLQQGLDSGSRQGLLGPRACVHPSPLRRDPFCAACQPLRLPACSARPDTSPLWLQWLPQPQPRVRPRKRRRPRPRRAPVLSTHHAARVSLHRWGGCGPHCRLRGEALVALGQPPHARWAPQQDWHWARRYGLPYVVRVDLRRLAPAPPATPAPAGTPGPILIPKQALAFAPFSPPKRLRLVVSHGSIDLDVGGEEL

SEQ ID NO: 1094 - protein, 2214 aa, synthetic construct
  REGION 1..2214: note = Description of Artificial Sequence: Synthetic polypeptide
MGTPKKKRKVMDKKYSIGLAIGTNSVGWAVITDEYKVPSKKFKVLGNTDRHSIKKNLIGALLFDSGETAEATRLKRTARRRYTRRKNRICYLQEIFSNEMAKVDDSFFHRLEESFLVEEDKKHERHPIFGNIVDEVAYHEKYPTIYHLRKKLVDSTDKADLRLIYLALAHMIKFRGHFLIEGDLNPDNSDVDKLFIQLVQTYNQLFEENPINASGVDAKAILSARLSKSRRLENLIAQLPGEKKNGLFGNLIALSLGLTPNFKSNFDLAEDAKLQLSKDTYDDDLDNLLAQIGDQYADLFLAAKNLSDAILLSDILRVNTEITKAPLSASMIKRYDEHHQDLTLLKALVRQQLPEKYKEIFFDQSKNGYAGYIDGGASQEEFYKFIKPILEKMDGTEELLVKLNREDLLRKQRTFDNGSIPHQIHLGELHAILRRQEDFYPFLKDNREKIEKILTFRIPYYVGPLARGNSRFAWMTRKSEETITPWNFEEVVDKGASAQSFIERMTNFDKNLPNEKVLPKHSLLYEYFTVYNELTKVKYVTEGMRKPAFLSGEQKKAIVDLLFKTNRKVTVKQLKEDYFKKIECFDSVEISGVEDRFNASLGTYHDLLKIIKDKDFLDNEENEDILEDIVLTLTLFEDREMIEERLKTYAHLFDDKVMKQLKRRRYTGWGRLSRKLINGIRDKQSGKTILDFLKSDGFANRNFMQLIHDDSLTFKEDIQKAQVSGQGDSLHEHIANLAGSPAIKKGILQTVKVVDELVKVMGRHKPENIVIEMARENQTTQKGQKNSRERMKRIEEGIKELGSQILKEHPVENTQLQNEKLYLYYLQNGRDMYVDQELDINRLSDYDVDAIVPQSFLKDDSIDNKVLTRSDKNRGKSDNVPSEEVVKKMKNYWRQLLNAKLITQRKFDNLTKAERGGLSELDKAGFIKRQLVETRQITKHVAQILDSRMNTKYDENDKLIREVKVITLKSKLVSDFRKDFQFYKVREINNYHHAHDAYLNAVVGTALIKKYPKLESEFVYGDYKVYDVRKMIAKSEQEIGKATAKYFFYSNIMNFFKTEITLANGEIRKRPLIETNGETGEIVWDKGRDFATVRKVLSMPQVNIVKKTEVQTGGFSKESILPKRNSDKLIARKKDWDPKKYGGFDSPTVAYSVLVVAKVEKGKSKKLKSVKELLGITIMERSSFEKNPIDFLEAKGYKEVKKDLIIKLPKYSLFELENGRKRMLASAGELQKGNELALPSKYVNFLYLASHYEKLKGSPEDNEQKQLFVEQHKHYLDEIIEQISEFSKRVILADANLDKVLSAYNKHRDKPIREQAENIIHLFTLTNLGAPAAFKYFDTTIDRKRYTSTKEVLDATLIHQSITGLYETRIDLSQLGGDPKKKRKVGGPSSGAPPPSGGSPAGSPTSTEEGTSESATPESGPGTSTEPSEGSAPGSPAGSPTSTEEGTSTEPSEGSAPGTSTEPSETGMEIPNPPTSKCITYWKRKVKSEYMRLRQLKRLQANMGAKALYVANFAKVQEKTQILNEEWKKLRVQPVQSMKPVSGHPFLKKCTIESIFPGFASQHMLMRSLNTVALVPIMYSWSPLQQNFMVEDETVLCNIPYMGDEVKEEDETFIEELINNYDGKVHGEEEMIPGSVLISDAVFLELVDALNQYSDEEEEGHNDTSDGKQDDSKEDLPVTRKRKRHAIEGNKKSSKKQFPNDMIFSAIASMFPENGVPDDMKERYRELTEMSDPNALPPQCTPNIDGPNAKSVQREQSLHSFHTLFCRRCFKYDCFLHPFHATPNVYKRKNKEIKIEPEPCGTDCFLLLEGAKEYAMLHNPRSKCSGRRRRRHHIVSASCSNASASAVAETKEGDSDRDTGNDWASSSSEANSRCQTPTKQKASPAPPQLCVVEAPSEPVEWTGAEESLFRVFHGTYFNNFCSIARLLGTKTCKQVFQFAVKESLILKLPTDELMNPSQKKKRKHRLWAAHCRKIQLKKDNSSTQVYNYQPCDHPDRPCDSTCPCIMTQNFCEKFCQCNPDCQNRFPGCRCKTQCNTKQCPCYLAVRECDPDLCLTCGASEHWDCKVVSCKNCSIQRGLKKHLLLAPSDVAGWGTFIKESVQKNEFISEYCGELISQDEADRRGKVYDKYMSSFLFNLNNDFVVDATRKGNKIRFANHSVNPNCYAKVVMVNGDHRIGIFAKRAIQAGEELFFDYRYSQADALKYVGIERETDVL

SEQ ID NO: 1095 - protein, 2213 aa, synthetic construct
  REGION 1..2213: note = Description of Artificial Sequence: Synthetic polypeptide
MGTPKKKRKVMDKKYSIGLAIGTNSVGWAVITDEYKVPSKKFKVLGNTDRHSIKKNLIGALLFDSGETAEATRLKRTARRRYTRRKNRICYLQEIFSNEMAKVDDSFFHRLEESFLVEEDKKHERHPIFGNIVDEVAYHEKYPTIYHLRKKLVDSTDKADLRLIYLALAHMIKFRGHFLIEGDLNPDNSDVDKLFIQLVQTYNQLFEENPINASGVDAKAILSARLSKSRRLENLIAQLPGEKKNGLFGNLIALSLGLTPNFKSNFDLAEDAKLQLSKDTYDDDLDNLLAQIGDQYADLFLAAKNLSDAILLSDILRVNTEITKAPLSASMIKRYDEHHQDLTLLKALVRQQLPEKYKEIFFDQSKNGYAGYIDGGASQEEFYKFIKPILEKMDGTEELLVKLNREDLLRKQRTFDNGSIPHQIHLGELHAILRRQEDFYPFLKDNREKIEKILTFRIPYYVGPLARGNSRFAWMTRKSEETITPWNFEEVVDKGASAQSFIERMTNFDKNLPNEKVLPKHSLLYEYFTVYNELTKVKYVTEGMRKPAFLSGEQKKAIVDLLFKTNRKVTVKQLKEDYFKKIECFDSVEISGVEDRFNASLGTYHDLLKIIKDKDFLDNEENEDILEDIVLTLTLFEDREMIEERLKTYAHLFDDKVMKQLKRRRYTGWGRLSRKLINGIRDKQSGKTILDFLKSDGFANRNFMQLIHDDSLTFKEDIQKAQVSGQGDSLHEHIANLAGSPAIKKGILQTVKVVDELVKVMGRHKPENIVIEMARENQTTQKGQKNSRERMKRIEEGIKELGSQILKEHPVENTQLQNEKLYLYYLQNGRDMYVDQELDINRLSDYDVDAIVPQSFLKDDSIDNKVLTRSDKNRGKSDNVPSEEVVKKMKNYWRQLLNAKLITQRKFDNLTKAERGGLSELDKAGFIKRQLVETRQITKHVAQILDSRMNTKYDENDKLIREVKVITLKSKLVSDFRKDFQFYKVREINNYHHAHDAYLNAVVGTALIKKYPKLESEFVYGDYKVYDVRKMIAKSEQEIGKATAKYFFYSNIMNFFKTEITLANGEIRKRPLIETNGETGEIVWDKGRDFATVRKVLSMPQVNIVKKTEVQTGGFSKESILPKRNSDKLIARKKDWDPKKYGGFDSPTVAYSVLVVAKVEKGKSKKLKSVKELLGITIMERSSFEKNPIDFLEAKGYKEVKKDLIIKLPKYSLFELENGRKRMLASAGELQKGNELALPSKYVNFLYLASHYEKLKGSPEDNEQKQLFVEQHKHYLDEIIEQISEFSKRVILADANLDKVLSAYNKHRDKPIREQAENIIHLFTLTNLGAPAAFKYFDTTIDRKRYTSTKEVLDATLIHQSITGLYETRIDLSQLGGDPKKKRKVGGPSSGAPPPSGGSPAGSPTSTEEGTSESATPESGPGTSTEPSEGSAPGSPAGSPTSTEEGTSTEPSEGSAPGTSTEPSETGMGQTGKKSEKGPVCWRKRVKSEYMRLRQLKRFRRADEVKSMFSSNRQKILERTEILNQEWKQRRIQPVHILTSVSSLRGTRECSVTSDLDFPTQVIPLKTLNAVASVPIMYSWSPLQQNFMVEDETVLHNIPYMGDEVLDQDGTFIEELIKNYDGKVHGDRECGFINDEIFVELVNALGQYNDDDDDDDGDDPEEREEKQKDLEDHRDDKESRPPRKFPSDKIFEAISSMFPDKGTAEELKEKYKELTEQQLPGALPPECTPNIDGPNAKSVQREQSLHSFHTLFCRRCFKYDCFLHPFHATPNTYKRKNTETALDNKPCGPQCYQHLEGAKEFAAALTAERIKTPPKRPGGRRRGRLPNNSSRPSTPTINVLESKDTDSDREAGTETGGENNDKEEEEKKDETSSSSEANSRCQTPIKMKPNIEPPENVEWSGAEASMFRVLIGTYYDNFCAIARLIGTKTCRQVYEFRVKESSIIAPAPAEDVDTPPRKKKRKHRLWAAHCRKIQLKKDGSSNHVYNYQPCDHPRQPCDSSCPCVIAQNFCEKFCQCSSECQNRFPGCRCKAQCNTKQCPCYLAVRECDPDLCLTCGAADHWDSKNVSCKNCSIQRGSKKHLLLAPSDVAGWGIFIKDPVQKNEFISEYCGEIISQDEADRRGKVYDKYMCSFLFNLNNDFVVDATRKGNKIRFANHSVNPNCYAKVMMVNGDHRIGIFAKRAIQTGEELFFDYRYSQADALKYVGIEREMEIP

SEQ ID NO: 1096 - protein, 2213 aa, synthetic construct
  REGION 1..2213: note = Description of Artificial Sequence: Synthetic polypeptide
MGTPKKKRKVMDKKYSIGLAIGTNSVGWAVITDEYKVPSKKFKVLGNTDRHSIKKNLIGALLFDSGETAEATRLKRTARRRYTRRKNRICYLQEIFSNEMAKVDDSFFHRLEESFLVEEDKKHERHPIFGNIVDEVAYHEKYPTIYHLRKKLVDSTDKADLRLIYLALAHMIKFRGHFLIEGDLNPDNSDVDKLFIQLVQTYNQLFEENPINASGVDAKAILSARLSKSRRLENLIAQLPGEKKNGLFGNLIALSLGLTPNFKSNFDLAEDAKLQLSKDTYDDDLDNLLAQIGDQYADLFLAAKNLSDAILLSDILRVNTEITKAPLSASMIKRYDEHHQDLTLLKALVRQQLPEKYKEIFFDQSKNGYAGYIDGGASQEEFYKFIKPILEKMDGTEELLVKLNREDLLRKQRTFDNGSIPHQIHLGELHAILRRQEDFYPFLKDNREKIEKILTFRIPYYVGPLARGNSRFAWMTRKSEETITPWNFEEVVDKGASAQSFIERMTNFDKNLPNEKVLPKHSLLYEYFTVYNELTKVKYVTEGMRKPAFLSGEQKKAIVDLLFKTNRKVTVKQLKEDYFKKIECFDSVEISGVEDRFNASLGTYHDLLKIIKDKDFLDNEENEDILEDIVLTLTLFEDREMIEERLKTYAHLFDDKVMKQLKRRRYTGWGRLSRKLINGIRDKQSGKTILDFLKSDGFANRNFMQLIHDDSLTFKEDIQKAQVSGQGDSLHEHIANLAGSPAIKKGILQTVKVVDELVKVMGRHKPENIVIEMARENQTTQKGQKNSRERMKRIEEGIKELGSQILKEHPVENTQLQNEKLYLYYLQNGRDMYVDQELDINRLSDYDVDAIVPQSFLKDDSIDNKVLTRSDKNRGKSDNVPSEEVVKKMKNYWRQLLNAKLITQRKFDNLTKAERGGLSELDKAGFIKRQLVETRQITKHVAQILDSRMNTKYDENDKLIREVKVITLKSKLVSDFRKDFQFYKVREINNYHHAHDAYLNAVVGTALIKKYPKLESEFVYGDYKVYDVRKMIAKSEQEIGKATAKYFFYSNIMNFFKTEITLANGEIRKRPLIETNGETGEIVWDKGRDFATVRKVLSMPQVNIVKKTEVQTGGFSKESILPKRNSDKLIARKKDWDPKKYGGFDSPTVAYSVLVVAKVEKGKSKKLKSVKELLGITIMERSSFEKNPIDFLEAKGYKEVKKDLIIKLPKYSLFELENGRKRMLASAGELQKGNELALPSKYVNFLYLASHYEKLKGSPEDNEQKQLFVEQHKHYLDEIIEQISEFSKRVILADANLDKVLSAYNKHRDKPIREQAENIIHLFTLTNLGAPAAFKYFDTTIDRKRYTSTKEVLDATLIHQSITGLYETRIDLSQLGGDPKKKRKVGGPSSGAPPPSGGSPAGSPTSTEEGTSESATPESGPGTSTEPSEGSAPGSPAGSPTSTEEGTSTEPSEGSAPGTSTEPSETGMGQTGKKSEKGPVCWRKRVKAEYMRLRQLKRFRRADEVKSMFSSNRQKILERTEILNQEWKQRRIQPVHILTSVSSLRGTRECSVTSDLDFPTQVIPLKTLNAVASVPIMYSWSPLQQNFMVEDETVLHNIPYMGDEVLDQDGTFIEELIKNYDGKVHGDRECGFINDEIFVELVNALGQYNDDDDDDDGDDPEEREEKQKDLEDHRDDKESRPPRKFPSDKIFEAISSMFPDKGTAEELKEKYKELTEQQLPGALPPECTPNIDGPNAKSVQREQSLHSFHTLFCRRCFKYDCFLHPFHATPNTYKRKNTETALDNKPCGPQCYQHLEGAKEFAAALTAERIKTPPKRPGGRRRGRLPNNSSRPSTPTINVLESKDTDSDREAGTETGGENNDKEEEEKKDETSSSSEANSRCQTPIKMKPNIEPPENVEWSGAEASMFRVLIGTYYDNFCAIARLIGTKTCRQVYEFRVKESSIIAPAPAEDVDTPPRKKKRKHRLWAAHCRKIQLKKDGSSNHVYNYQPCDHPRQPCDSSCPCVIAQNFCEKFCQCSSECQNRFPGCRCKAQCNTKQCPCYLAVRECDPDLCLTCGAADHWDSKNVSCKNCSIQRGSKKHLLLAPSDVAGWGIFIKDPVQKNEFISEYCGEIISQDEADRRGKVYDKYMCSFLFNLNNDFVVDATRKGNKIRFANHSVNPNCYAKVMMVNGDHRIGIFAKRAIQTGEELFFDYRYSQADALKYVGIEREMEIP

SEQ ID NO: 1097 - protein, 2765 aa, synthetic construct
  REGION 1..2765: note = Description of Artificial Sequence: Synthetic polypeptide
MGTPKKKRKVMDKKYSIGLAIGTNSVGWAVITDEYKVPSKKFKVLGNTDRHSIKKNLIGALLFDSGETAEATRLKRTARRRYTRRKNRICYLQEIFSNEMAKVDDSFFHRLEESFLVEEDKKHERHPIFGNIVDEVAYHEKYPTIYHLRKKLVDSTDKADLRLIYLALAHMIKFRGHFLIEGDLNPDNSDVDKLFIQLVQTYNQLFEENPINASGVDAKAILSARLSKSRRLENLIAQLPGEKKNGLFGNLIALSLGLTPNFKSNFDLAEDAKLQLSKDTYDDDLDNLLAQIGDQYADLFLAAKNLSDAILLSDILRVNTEITKAPLSASMIKRYDEHHQDLTLLKALVRQQLPEKYKEIFFDQSKNGYAGYIDGGASQEEFYKFIKPILEKMDGTEELLVKLNREDLLRKQRTFDNGSIPHQIHLGELHAILRRQEDFYPFLKDNREKIEKILTFRIPYYVGPLARGNSRFAWMTRKSEETITPWNFEEVVDKGASAQSFIERMTNFDKNLPNEKVLPKHSLLYEYFTVYNELTKVKYVTEGMRKPAFLSGEQKKAIVDLLFKTNRKVTVKQLKEDYFKKIECFDSVEISGVEDRFNASLGTYHDLLKIIKDKDFLDNEENEDILEDIVLTLTLFEDREMIEERLKTYAHLFDDKVMKQLKRRRYTGWGRLSRKLINGIRDKQSGKTILDFLKSDGFANRNFMQLIHDDSLTFKEDIQKAQVSGQGDSLHEHIANLAGSPAIKKGILQTVKVVDELVKVMGRHKPENIVIEMARENQTTQKGQKNSRERMKRIEEGIKELGSQILKEHPVENTQLQNEKLYLYYLQNGRDMYVDQELDINRLSDYDVDAIVPQSFLKDDSIDNKVLTRSDKNRGKSDNVPSEEVVKKMKNYWRQLLNAKLITQRKFDNLTKAERGGLSELDKAGFIKRQLVETRQITKHVAQILDSRMNTKYDENDKLIREVKVITLKSKLVSDFRKDFQFYKVREINNYHHAHDAYLNAVVGTALIKKYPKLESEFVYGDYKVYDVRKMIAKSEQEIGKATAKYFFYSNIMNFFKTEITLANGEIRKRPLIETNGETGEIVWDKGRDFATVRKVLSMPQVNIVKKTEVQTGGFSKESILPKRNSDKLIARKKDWDPKKYGGFDSPTVAYSVLVVAKVEKGKSKKLKSVKELLGITIMERSSFEKNPIDFLEAKGYKEVKKDLIIKLPKYSLFELENGRKRMLASAGELQKGNELALPSKYVNFLYLASHYEKLKGSPEDNEQKQLFVEQHKHYLDEIIEQISEFSKRVILADANLDKVLSAYNKHRDKPIREQAENIIHLFTLTNLGAPAAFKYFDTTIDRKRYTSTKEVLDATLIHQSITGLYETRIDLSQLGGDPKKKRKVGGPSSGAPPPSGGSPAGSPTSTEEGTSESATPESGPGTSTEPSEGSAPGSPAGSPTSTEEGTSTEPSEGSAPGTSTEPSETGMAAADAEAVPARGEPQQDCCVKTELLGEETPMAADEGSAEKQAGEAHMAADGETNGSCENSDASSHANAAKHTQDSARVNPQDGTNTLTRIAENGVSERDSEAAKQNHVTADDFVQTSVIGSNGYILNKPALQAQPLRTTSTLASSLPGHAAKTLPGGAGKGRTPSAFPQTPAAPPATLGEGSADTEDRKLPAPGADVKVHRARKTMPKSVVGLHAASKDPREVREARDHKEPKEEINKNISDFGRQQLLPPFPSLHQSLPQNQCYMATTKSQTACLPFVLAAAVSRKKKRRMGTYSLVPKKKTKVLKQRTVIEMFKSITHSTVGSKGEKDLGASSLHVNGESLEMDSDEDDSEELEEDDGHGAEQAAAFPTEDSRTSKESMSEADRAQKMDGESEEEQESVDTGEEEEGGDESDLSSESSIKKKFLKRKGKTDSPWIKPARKRRRRSRKKPSGALGSESYKSSAGSAEQTAPGDSTGYMEVSLDSLDLRVKGILSSQAEGLANGPDVLETDGLQEVPLCSCRMETPKSREITTLANNQCMATESVDHELGRCTNSVVKYELMRPSNKAPLLVLCEDHRGRMVKHQCCPGCGYFCTAGNFMECQPESSISHRFHKDCASRVNNASYCPHCGEESSKAKEVTIAKADTTSTVTPVPGQEKGSALEGRADTTTGSAAGPPLSEDDKLQGAASHVPEGFDPTGPAGLGRPTPGLSQGPGKETLESALIALDSEKPKKLRFHPKQLYFSARQGELQKVLLMLVDGIDPNFKMEHQNKRSPLHAAAEAGHVDICHMLVQAGANIDTCSEDQRTPLMEAAENNHLEAVKYLIKAGALVDPKDAEGSTCLHLAAKKGHYEVVQYLLSNGQMDVNCQDDGGWTPMIWATEYKHVDLVKLLLSKGSDINIRDNEENICLHWAAFSGCVDIAEILLAAKCDLHAVNIHGDSPLHIAARENRYDCVVLFLSRDSDVTLKNKEGETPLQCASLNSQVWSALQMSKALQDSAPDRPSPVERIVSRDIARGYERIPIPCVNAVDSEPCPSNYKYVSQNCVTSPMNIDRNITHLQYCVCIDDCSSSNCMCGQLSMRCWYDKDGRLLPEFNMAEPPLIFECNHACSCWRNCRNRVVQNGLRARLQLYRTRDMGWGVRSLQDIPPGTFVCEYVGELISDSEADVREEDSYLFDLDNKDGEVYCIDARFYGNVSRFINHHCEPNLVPVRVFMAHQDLRFPRIAFFSTRLIEAGEQLGFDYGERFWDIKGKLFSCRCGSPKCRHSSAALAQRQASAAQEAQEDGLPDTSSAAAADPL

SEQ ID NO: 1098 - protein, 2677 aa, synthetic construct
  REGION 1..2677: note = Description of Artificial Sequence: Synthetic polypeptide
MGTPKKKRKVMDKKYSIGLAIGTNSVGWAVITDEYKVPSKKFKVLGNTDRHSIKKNLIGALLFDSGETAEATRLKRTARRRYTRRKNRICYLQEIFSNEMAKVDDSFFHRLEESFLVEEDKKHERHPIFGNIVDEVAYHEKYPTIYHLRKKLVDSTDKADLRLIYLALAHMIKFRGHFLIEGDLNPDNSDVDKLFIQLVQTYNQLFEENPINASGVDAKAILSARLSKSRRLENLIAQLPGEKKNGLFGNLIALSLGLTPNFKSNFDLAEDAKLQLSKDTYDDDLDNLLAQIGDQYADLFLAAKNLSDAILLSDILRVNTEITKAPLSASMIKRYDEHHQDLTLLKALVRQQLPEKYKEIFFDQSKNGYAGYIDGGASQEEFYKFIKPILEKMDGTEELLVKLNREDLLRKQRTFDNGSIPHQIHLGELHAILRRQEDFYPFLKDNREKIEKILTFRIPYYVGPLARGNSRFAWMTRKSEETITPWNFEEVVDKGASAQSFIERMTNFDKNLPNEKVLPKHSLLYEYFTVYNELTKVKYVTEGMRKPAFLSGEQKKAIVDLLFKTNRKVTVKQLKEDYFKKIECFDSVEISGVEDRFNASLGTYHDLLKIIKDKDFLDNEENEDILEDIVLTLTLFEDREMIEERLKTYAHLFDDKVMKQLKRRRYTGWGRLSRKLINGIRDKQSGKTILDFLKSDGFANRNFMQLIHDDSLTFKEDIQKAQVSGQGDSLHEHIANLAGSPAIKKGILQTVKVVDELVKVMGRHKPENIVIEMARENQTTQKGQKNSRERMKRIEEGIKELGSQILKEHPVENTQLQNEKLYLYYLQNGRDMYVDQELDINRLSDYDVDAIVPQSFLKDDSIDNKVLTRSDKNRGKSDNVPSEEVVKKMKNYWRQLLNAKLITQRKFDNLTKAERGGLSELDKAGFIKRQLVETRQITKHVAQILDSRMNTKYDENDKLIREVKVITLKSKLVSDFRKDFQFYKVREINNYHHAHDAYLNAVVGTALIKKYPKLESEFVYGDYKVYDVRKMIAKSEQEIGKATAKYFFYSNIMNFFKTEITLANGEIRKRPLIETNGETGEIVWDKGRDFATVRKVLSMPQVNIVKKTEVQTGGFSKESILPKRNSDKLIARKKDWDPKKYGGFDSPTVAYSVLVVAKVEKGKSKKLKSVKELLGITIMERSSFEKNPIDFLEAKGYKEVKKDLIIKLPKYSLFELENGRKRMLASAGELQKGNELALPSKYVNFLYLASHYEKLKGSPEDNEQKQLFVEQHKHYLDEIIEQISEFSKRVILADANLDKVLSAYNKHRDKPIREQAENIIHLFTLTNLGAPAAFKYFDTTIDRKRYTSTKEVLDATLIHQSITGLYETRIDLSQLGGDPKKKRKVGGPSSGAPPPSGGSPAGSPTSTEEGTSESATPESGPGTSTEPSEGSAPGSPAGSPTSTEEGTSTEPSEGSAPGTSTEPSETGMAAAAGAAAAAAAEGEAPAEMGALLLEKETRGATERVHGSLGDTPRSEETLPKATPDSLEPAGPSSPASVTVTVGDEGADTPVGATPLIGDESENLEGDGDLRGGRILLGHATKSFPSSPSKGGSCPSRAKMSMTGAGKSPPSVQSLAMRLLSMPGAQGAAAAGSEPPPATTSPEGQPKVHRARKTMSKPGNGQPPVPEKRPPEIQHFRMSDDVHSLGKVTSDLAKRRKLNSGGGLSEELGSARRSGEVTLTKGDPGSLEEWETVVGDDFSLYYDSYSVDERVDSDSKSEVEALTEQLSEEEEEEEEEEEEEEEEEEEEEEEEDEESGNQSDRSGSSGRRKAKKKWRKDSPWVKPSRKRRKREPPRAKEPRGVNGVGSSGPSEYMEVPLGSLELPSEGTLSPNHAGVSNDTSSLETERGFEELPLCSCRMEAPKIDRISERAGHKCMATESVDGELSGCNAAILKRETMRPSSRVALMVLCETHRARMVKHHCCPGCGYFCTAGTFLECHPDFRVAHRFHKACVSQLNGMVFCPHCGEDASEAQEVTIPRGDGVTPPAGTAAPAPPPLSQDVPGRADTSQPSARMRGHGEPRRPPCDPLADTIDSSGPSLTLPNGGCLSAVGLPLGPGREALEKALVIQESERRKKLRFHPRQLYLSVKQGELQKVILMLLDNLDPNFQSDQQSKRTPLHAAAQKGSVEICHVLLQAGANINAVDKQQRTPLMEAVVNNHLEVARYMVQRGGCVYSKEEDGSTCLHHAAKIGNLEMVSLLLSTGQVDVNAQDSGGWTPIIWAAEHKHIEVIRMLLTRGADVTLTDNEENICLHWASFTGSAAIAEVLLNARCDLHAVNYHGDTPLHIAARESYHDCVLLFLSRGANPELRNKEGDTAWDLTPERSDVWFALQLNRKLRLGVGNRAIRTEKIICRDVARGYENVPIPCVNGVDGEPCPEDYKYISENCETSTMNIDRNITHLQHCTCVDDCSSSNCLCGQLSIRCWYDKDGRLLQEFNKIEPPLIFECNQACSCWRNCKNRVVQSGIKVRLQLYRTAKMGWGVRALQTIPQGTFICEYVGELISDAEADVREDDSYLFDLDNKDGEVYCIDARYYGNISRFINHLCDPNIIPVRVFMLHQDLRFPRIAFFSSRDIRTGEELGFDYGDRFWDIKSKYFTCQCGSEKCKHSAEAIALEQSRLARLDPHPELLPELGSLPPVNT

SEQ ID NO: 1099 - protein, 2319 aa, synthetic construct
  REGION 1..2319: note = Description of Artificial Sequence: Synthetic polypeptide
MGTPKKKRKVMDKKYSIGLAIGTNSVGWAVITDEYKVPSKKFKVLGNTDRHSIKKNLIGALLFDSGETAEATRLKRTARRRYTRRKNRICYLQEIFSNEMAKVDDSFFHRLEESFLVEEDKKHERHPIFGNIVDEVAYHEKYPTIYHLRKKLVDSTDKADLRLIYLALAHMIKFRGHFLIEGDLNPDNSDVDKLFIQLVQTYNQLFEENPINASGVDAKAILSARLSKSRRLENLIAQLPGEKKNGLFGNLIALSLGLTPNFKSNFDLAEDAKLQLSKDTYDDDLDNLLAQIGDQYADLFLAAKNLSDAILLSDILRVNTEITKAPLSASMIKRYDEHHQDLTLLKALVRQQLPEKYKEIFFDQSKNGYAGYIDGGASQEEFYKFIKPILEKMDGTEELLVKLNREDLLRKQRTFDNGSIPHQIHLGELHAILRRQEDFYPFLKDNREKIEKILTFRIPYYVGPLARGNSRFAWMTRKSEETITPWNFEEVVDKGASAQSFIERMTNFDKNLPNEKVLPKHSLLYEYFTVYNELTKVKYVTEGMRKPAFLSGEQKKAIVDLLFKTNRKVTVKQLKEDYFKKIECFDSVEISGVEDRFNASLGTYHDLLKIIKDKDFLDNEENEDILEDIVLTLTLFEDREMIEERLKTYAHLFDDKVMKQLKRRRYTGWGRLSRKLINGIRDKQSGKTILDFLKSDGFANRNFMQLIHDDSLTFKEDIQKAQVSGQGDSLHEHIANLAGSPAIKKGILQTVKVVDELVKVMGRHKPENIVIEMARENQTTQKGQKNSRERMKRIEEGIKELGSQILKEHPVENTQLQNEKLYLYYLQNGRDMYVDQELDINRLSDYDVDAIVPQSFLKDDSIDNKVLTRSDKNRGKSDNVPSEEVVKKMKNYWRQLLNAKLITQRKFDNLTKAERGGLSELDKAGFIKRQLVETRQITKHVAQILDSRMNTKYDENDKLIREVKVITLKSKLVSDFRKDFQFYKVREINNYHHAHDAYLNAVVGTALIKKYPKLESEFVYGDYKVYDVRKMIAKSEQEIGKATAKYFFYSNIMNFFKTEITLANGEIRKRPLIETNGETGEIVWDKGRDFATVRKVLSMPQVNIVKKTEVQTGGFSKESILPKRNSDKLIARKKDWDPKKYGGFDSPTVAYSVLVVAKVEKGKSKKLKSVKELLGITIMERSSFEKNPIDFLEAKGYKEVKKDLIIKLPKYSLFELENGRKRMLASAGELQKGNELALPSKYVNFLYLASHYEKLKGSPEDNEQKQLFVEQHKHYLDEIIEQISEFSKRVILADANLDKVLSAYNKHRDKPIREQAENIIHLFTLTNLGAPAAFKYFDTTIDRKRYTSTKEVLDATLIHQSITGLYETRIDLSQLGGDPKKKRKVGGPSSGAPPPSGGSPAGSPTSTEEGTSESATPESGPGTSTEPSEGSAPGSPAGSPTSTEEGTSTEPSEGSAPGTSTEPSETGMLSGKKAAAAAAAAAAAATGTEAGPGTAGGSENGSEVAAQPAGLSGPAEVGPGAVGERTPRKKEPPRASPPGGLAEPPGSAGPQAGPTVVPGSATPMETGIAETPEGRRTSRRKRAKVEYREMDESLANLSEDEYYSEEERNAKAEKEKKLPPPPPQAPPEEENESEPEEPSGVEGAAFQSRLPHDRMTSQEAACFPDIISGPQQTQKVFLFIRNRTLQLWLDNPKIQLTFEATLQQLEAPYNSDTVLVHRVHSYLERHGLINFGIYKRIKPLPTKKTGKVIIIGSGVSGLAAARQLQSFGMDVTLLEARDRVGGRVATFRKGNYVADLGAMVVTGLGGNPMAVVSKQVNMELAKIKQKCPLYEANGQAVPKEKDEMVEQEFNRLLEATSYLSHQLDFNVLNNKPVSLGQALEVVIQLQEKHVKDEQIEHWKKIVKTQEELKELLNKMVNLKEKIKELHQQYKEASEVKPPRDITAEFLVKSKHRDLTALCKEYDELAETQGKLEEKLQELEANPPSDVYLSSRDRQILDWHFANLEFANATPLSTLSLKHWDQDDDFEFTGSHLTVRNGYSCVPVALAEGLDIKLNTAVRQVRYTASGCEVIAVNTRSTSQTFIYKCDAVLCTLPLGVLKQQPPAVQFVPPLPEWKTSAVQRMGFGNLNKVVLCFDRVFWDPSVNLFGHVGSTTASRGELFLFWNLYKAPILLALVAGEAAGIMENISDDVIVGRCLAILKGIFGSSAVPQPKETVVSRWRADPWARGSYSYVAAGSSGNDYDLMAQPITPGPSIPGAPQPIPRLFFAGEHTIRNYPATVHGALLSGLREAGRIADQFLGAMYTLPRQATPGVPAQQSPSM

SEQ ID NO: 1100 - protein, 2206 aa, synthetic construct
  REGION 1..2206: note = Description of Artificial Sequence: Synthetic polypeptide
MGTPKKKRKVMDKKYSIGLAIGTNSVGWAVITDEYKVPSKKFKVLGNTDRHSIKKNLIGALLFDSGETAEATRLKRTARRRYTRRKNRICYLQEIFSNEMAKVDDSFFHRLEESFLVEEDKKHERHPIFGNIVDEVAYHEKYPTIYHLRKKLVDSTDKADLRLIYLALAHMIKFRGHFLIEGDLNPDNSDVDKLFIQLVQTYNQLFEENPINASGVDAKAILSARLSKSRRLENLIAQLPGEKKNGLFGNLIALSLGLTPNFKSNFDLAEDAKLQLSKDTYDDDLDNLLAQIGDQYADLFLAAKNLSDAILLSDILRVNTEITKAPLSASMIKRYDEHHQDLTLLKALVRQQLPEKYKEIFFDQSKNGYAGYIDGGASQEEFYKFIKPILEKMDGTEELLVKLNREDLLRKQRTFDNGSIPHQIHLGELHAILRRQEDFYPFLKDNREKIEKILTFRIPYYVGPLARGNSRFAWMTRKSEETITPWNFEEVVDKGASAQSFIERMTNFDKNLPNEKVLPKHSLLYEYFTVYNELTKVKYVTEGMRKPAFLSGEQKKAIVDLLFKTNRKVTVKQLKEDYFKKIECFDSVEISGVEDRFNASLGTYHDLLKIIKDKDFLDNEENEDILEDIVLTLTLFEDREMIEERLKTYAHLFDDKVMKQLKRRRYTGWGRLSRKLINGIRDKQSGKTILDFLKSDGFANRNFMQLIHDDSLTFKEDIQKAQVSGQGDSLHEHIANLAGSPAIKKGILQTVKVVDELVKVMGRHKPENIVIEMARENQTTQKGQKNSRERMKRIEEGIKELGSQILKEHPVENTQLQNEKLYLYYLQNGRDMYVDQELDINRLSDYDVDAIVPQSFLKDDSIDNKVLTRSDKNRGKSDNVPSEEVVKKMKNYWRQLLNAKLITQRKFDNLTKAERGGLSELDKAGFIKRQLVETRQITKHVAQILDSRMNTKYDENDKLIREVKVITLKSKLVSDFRKDFQFYKVREINNYHHAHDAYLNAVVGTALIKKYPKLESEFVYGDYKVYDVRKMIAKSEQEIGKATAKYFFYSNIMNFFKTEITLANGEIRKRPLIETNGETGEIVWDKGRDFATVRKVLSMPQVNIVKKTEVQTGGFSKESILPKRNSDKLIARKKDWDPKKYGGFDSPTVAYSVLVVAKVEKGKSKKLKSVKELLGITIMERSSFEKNPIDFLEAKGYKEVKKDLIIKLPKYSLFELENGRKRMLASAGELQKGNELALPSKYVNFLYLASHYEKLKGSPEDNEQKQLFVEQHKHYLDEIIEQISEFSKRVILADANLDKVLSAYNKHRDKPIREQAENIIHLFTLTNLGAPAAFKYFDTTIDRKRYTSTKEVLDATLIHQSITGLYETRIDLSQLGGDPKKKRKVGGPSSGAPPPSGGSPAGSPTSTEEGTSESATPESGPGTSTEPSEGSAPGSPAGSPTSTEEGTSTEPSEGSAPGTSTEPSETGMAPQKHGGGGGGGSGPSAGSGGGGFGGSAAVAAATASGGKSGGGSCGGGGSYSASSSSSAAAAAGAAVLPVKKPKMEHVQADHELFLQAFEKPTQIYRFLRTRNLIAPIFLHRTLTYMSHRNSRTNIKRKTFKVDDMLSKVEKMKGEQESHSLSAHLQLTFTGFFHKNDKPSPNSENEQNSVTLEVLLVKVCHKKRKDVSCPIRQVPTGKKQVPLNPDLNQTKPGNFPSLAVSSNEFEPSNSHMVKSYSLLFRVTRPGRREFNGMINGETNENIDVNEELPARRKRNREDGEKTFVAQMTVFDKNRRLQLLDGEYEVAMQEMEECPISKKRATWETILDGKRLPPFETFSQGPTLQFTLRWTGETNDKSTAPIAKPLATRNSESLHQENKPGSVKPTQTIAVKESLTTDLQTRKEKDTPNENRQKLRIFYQFLYNNNTRQQTEARDDLHCPWCTLNCRKLYSLLKHLKLCHSRFIFNYVYHPKGARIDVSINECYDGSYAGNPQDIHRQPGFAFSRNGPVKRTPITHILVCRPKRTKASMSEFLESEDGEVEQQRTYSSGHNRLYFHSDTCLPLRPQEMEVDSEDEKDPEWLREKTITQIEEFSDVNEGEKEVMKLWNLHVMKHGFIADNQMNHACMLFVENYGQKIIKKNLCRNFMLHLVSMHDFNLISIMSIDKAVTKLREMQQKLEKGESASPANEEITEEQNGTANGFSEINSKEKALETDSVSGVSKQSKKQKL

SEQ ID NO: 1101 - protein, 1908 aa, synthetic construct
  REGION 1..1908: note = Description of Artificial Sequence: Synthetic polypeptide
MGTPKKKRKVMDKKYSIGLAIGTNSVGWAVITDEYKVPSKKFKVLGNTDRHSIKKNLIGALLFDSGETAEATRLKRTARRRYTRRKNRICYLQEIFSNEMAKVDDSFFHRLEESFLVEEDKKHERHPIFGNIVDEVAYHEKYPTIYHLRKKLVDSTDKADLRLIYLALAHMIKFRGHFLIEGDLNPDNSDVDKLFIQLVQTYNQLFEENPINASGVDAKAILSARLSKSRRLENLIAQLPGEKKNGLFGNLIALSLGLTPNFKSNFDLAEDAKLQLSKDTYDDDLDNLLAQIGDQYADLFLAAKNLSDAILLSDILRVNTEITKAPLSASMIKRYDEHHQDLTLLKALVRQQLPEKYKEIFFDQSKNGYAGYIDGGASQEEFYKFIKPILEKMDGTEELLVKLNREDLLRKQRTFDNGSIPHQIHLGELHAILRRQEDFYPFLKDNREKIEKILTFRIPYYVGPLARGNSRFAWMTRKSEETITPWNFEEVVDKGASAQSFIERMTNFDKNLPNEKVLPKHSLLYEYFTVYNELTKVKYVTEGMRKPAFLSGEQKKAIVDLLFKTNRKVTVKQLKEDYFKKIECFDSVEISGVEDRFNASLGTYHDLLKIIKDKDFLDNEENEDILEDIVLTLTLFEDREMIEERLKTYAHLFDDKVMKQLKRRRYTGWGRLSRKLINGIRDKQSGKTILDFLKSDGFANRNFMQLIHDDSLTFKEDIQKAQVSGQGDSLHEHIANLAGSPAIKKGILQTVKVVDELVKVMGRHKPENIVIEMARENQTTQKGQKNSRERMKRIEEGIKELGSQILKEHPVENTQLQNEKLYLYYLQNGRDMYVDQELDINRLSDYDVDAIVPQSFLKDDSIDNKVLTRSDKNRGKSDNVPSEEVVKKMKNYWRQLLNAKLITQRKFDNLTKAERGGLSELDKAGFIKRQLVETRQITKHVAQILDSRMNTKYDENDKLIREVKVITLKSKLVSDFRKDFQFYKVREINNYHHAHDAYLNAVVGTALIKKYPKLESEFVYGDYKVYDVRKMIAKSEQEIGKATAKYFFYSNIMNFFKTEITLANGEIRKRPLIETNGETGEIVWDKGRDFATVRKVLSMPQVNIVKKTEVQTGGFSKESILPKRNSDKLIARKKDWDPKKYGGFDSPTVAYSVLVVAKVEKGKSKKLKSVKELLGITIMERSSFEKNPIDFLEAKGYKEVKKDLIIKLPKYSLFELENGRKRMLASAGELQKGNELALPSKYVNFLYLASHYEKLKGSPEDNEQKQLFVEQHKHYLDEIIEQISEFSKRVILADANLDKVLSAYNKHRDKPIREQAENIIHLFTLTNLGAPAAFKYFDTTIDRKRYTSTKEVLDATLIHQSITGLYETRIDLSQLGGDPKKKRKVGGPSSGAPPPSGGSPAGSPTSTEEGTSESATPESGPGTSTEPSEGSAPGSPAGSPTSTEEGTSTEPSEGSAPGTSTEPSETGMSEREVSTAPAGTDMPAAKKQKLSSDENSNPDLSGDENDDAVSIESGTNTERPDTPTNTPNAPGRKSWGKGKWKSKKCKYSFKCVNSLKEDHNQPLFGVQFNWHSKEGDPLVFATVGSNRVTLYECHSQGEIRLLQSYVDADADENFYTCAWTYDSNTSHPLLAVAGSRGIIRIINPITMQCIKHYVGHGNAINELKFHPRDPNLLLSVSKDHALRLWNIQTDTLVAIFGGVEGHRDEVLSADYDLLGEKIMSCGMDHSLKLWRINSKRMMNAIKESYDYNPNKTNRPFISQKIHFPDFSTRDIHRNYVDCVRWLGDLILSKSCENAIVCWKPGKMEDDIDKIKPSESNVTILGRFDYSQCDIWYMRFSMDFWQKMLALGNQVGKLYVWDLEVEDPHKAKCTTLTHHKCGAAIRQTSFSRDSSILIAVCDDASIWRWDRLR

SEQ ID NO: 1102 - protein, 1873 aa, synthetic construct
  REGION 1..1873: note = Description of Artificial Sequence: Synthetic polypeptide
MGTPKKKRKVMDKKYSIGLAIGTNSVGWAVITDEYKVPSKKFKVLGNTDRHSIKKNLIGALLFDSGETAEATRLKRTARRRYTRRKNRICYLQEIFSNEMAKVDDSFFHRLEESFLVEEDKKHERHPIFGNIVDEVAYHEKYPTIYHLRKKLVDSTDKADLRLIYLALAHMIKFRGHFLIEGDLNPDNSDVDKLFIQLVQTYNQLFEENPINASGVDAKAILSARLSKSRRLENLIAQLPGEKKNGLFGNLIALSLGLTPNFKSNFDLAEDAKLQLSKDTYDDDLDNLLAQIGDQYADLFLAAKNLSDAILLSDILRVNTEITKAPLSASMIKRYDEHHQDLTLLKALVRQQLPEKYKEIFFDQSKNGYAGYIDGGASQEEFYKFIKPILEKMDGTEELLVKLNREDLLRKQRTFDNGSIPHQIHLGELHAILRRQEDFYPFLKDNREKIEKILTFRIPYYVGPLARGNSRFAWMTRKSEETITPWNFEEVVDKGASAQSFIERMTNFDKNLPNEKVLPKHSLLYEYFTVYNELTKVKYVTEGMRKPAFLSGEQKKAIVDLLFKTNRKVTVKQLKEDYFKKIECFDSVEISGVEDRFNASLGTYHDLLKIIKDKDFLDNEENEDILEDIVLTLTLFEDREMIEERLKTYAHLFDDKVMKQLKRRRYTGWGRLSRKLINGIRDKQSGKTILDFLKSDGFANRNFMQLIHDDSLTFKEDIQKAQVSGQGDSLHEHIANLAGSPAIKKGILQTVKVVDELVKVMGRHKPENIVIEMARENQTTQKGQKNSRERMKRIEEGIKELGSQILKEHPVENTQLQNEKLYLYYLQNGRDMYVDQELDINRLSDYDVDAIVPQSFLKDDSIDNKVLTRSDKNRGKSDNVPSEEVVKKMKNYWRQLLNAKLITQRKFDNLTKAERGGLSELDKAGFIKRQLVETRQITKHVAQILDSRMNTKYDENDKLIREVKVITLKSKLVSDFRKDFQFYKVREINNYHHAHDAYLNAVVGTALIKKYPKLESEFVYGDYKVYDVRKMIAKSEQEIGKATAKYFFYSNIMNFFKTEITLANGEIRKRPLIETNGETGEIVWDKGRDFATVRKVLSMPQVNIVKKTEVQTGGFSKESILPKRNSDKLIARKKDWDPKKYGGFDSPTVAYSVLVVAKVEKGKSKKLKSVKELLGITIMERSSFEKNPIDFLEAKGYKEVKKDLIIKLPKYSLFELENGRKRMLASAGELQKGNELALPSKYVNFLYLASHYEKLKGSPEDNEQKQLFVEQHKHYLDEIIEQISEFSKRVILADANLDKVLSAYNKHRDKPIREQAENIIHLFTLTNLGAPAAFKYFDTTIDRKRYTSTKEVLDATLIHQSITGLYETRIDLSQLGGDPKKKRKVGGPSSGAPPPSGGSPAGSPTSTEEGTSESATPESGPGTSTEPSEGSAPGSPAGSPTSTEEGTSTEPSEGSAPGTSTEPSETGMTTPANAQNASKTWELSLYELHRTPQEAIMDGTEIAVSPRSLHSELMCPICLDMLKNTMTTKECLHRFCSDCIVTALRSGNKECPTCRKKLVSKRSLRPDPNFDALISKIYPSREEYEAHQDRVLIRLSRLHNQQALSSSIEEGLRMQAMHRAQRVRRPIPGSDQTTTMSGGEGEPGEGEGDGEDVSSDSAPDSAPGPAPKRPRGGGAGGSSVGTGGGGTGGVGGGAGSEDSGDRGGTLGGGTLGPPSPPGAPSPPEPGGEIELVFRPHPLLVEKGEYCQTRYVKTTGNATVDHLSKYLALRIALERRQQQEAGEPGGPGGGASDTGGPDGCGGEGGGAGGGDGPEEPALPSLEGVSEKQYTIYIAPGGGAFTTLNGSLTLELVNEKFWKVSRPLELCYAPTKDPK

SEQ ID NO: 1103 - protein, 1803 aa, synthetic construct
  REGION 1..1803: note = Description of Artificial Sequence: Synthetic polypeptide
MGTPKKKRKVMDKKYSIGLAIGTNSVGWAVITDEYKVPSKKFKVLGNTDRHSIKKNLIGALLFDSGETAEATRLKRTARRRYTRRKNRICYLQEIFSNEMAKVDDSFFHRLEESFLVEEDKKHERHPIFGNIVDEVAYHEKYPTIYHLRKKLVDSTDKADLRLIYLALAHMIKFRGHFLIEGDLNPDNSDVDKLFIQLVQTYNQLFEENPINASGVDAKAILSARLSKSRRLENLIAQLPGEKKNGLFGNLIALSLGLTPNFKSNFDLAEDAKLQLSKDTYDDDLDNLLAQIGDQYADLFLAAKNLSDAILLSDILRVNTEITKAPLSASMIKRYDEHHQDLTLLKALVRQQLPEKYKEIFFDQSKNGYAGYIDGGASQEEFYKFIKPILEKMDGTEELLVKLNREDLLRKQRTFDNGSIPHQIHLGELHAILRRQEDFYPFLKDNREKIEKILTFRIPYYVGPLARGNSRFAWMTRKSEETITPWNFEEVVDKGASAQSFIERMTNFDKNLPNEKVLPKHSLLYEYFTVYNELTKVKYVTEGMRKPAFLSGEQKKAIVDLLFKTNRKVTVKQLKEDYFKKIECFDSVEISGVEDRFNASLGTYHDLLKIIKDKDFLDNEENEDILEDIVLTLTLFEDREMIEERLKTYAHLFDDKVMKQLKRRRYTGWGRLSRKLINGIRDKQSGKTILDFLKSDGFANRNFMQLIHDDSLTFKEDIQKAQVSGQGDSLHEHIANLAGSPAIKKGILQTVKVVDELVKVMGRHKPENIVIEMARENQTTQKGQKNSRERMKRIEEGIKELGSQILKEHPVENTQLQNEKLYLYYLQNGRDMYVDQELDINRLSDYDVDAIVPQSFLKDDSIDNKVLTRSDKNRGKSDNVPSEEVVKKMKNYWRQLLNAKLITQRKFDNLTKAERGGLSELDKAGFIKRQLVETRQITKHVAQILDSRMNTKYDENDKLIREVKVITLKSKLVSDFRKDFQFYKVREINNYHHAHDAYLNAVVGTALIKKYPKLESEFVYGDYKVYDVRKMIAKSEQEIGKATAKYFFYSNIMNFFKTEITLANGEIRKRPLIETNGETGEIVWDKGRDFATVRKVLSMPQVNIVKKTEVQTGGFSKESILPKRNSDKLIARKKDWDPKKYGGFDSPTVAYSVLVVAKVEKGKSKKLKSVKELLGITIMERSSFEKNPIDFLEAKGYKEVKKDLIIKLPKYSLFELENGRKRMLASAGELQKGNELALPSKYVNFLYLASHYEKLKGSPEDNEQKQLFVEQHKHYLDEIIEQISEFSKRVILADANLDKVLSAYNKHRDKPIREQAENIIHLFTLTNLGAPAAFKYFDTTIDRKRYTSTKEVLDATLIHQSITGLYETRIDLSQLGGDPKKKRKVGGPSSGAPPPSGGSPAGSPTSTEEGTSESATPESGPGTSTEPSEGSAPGSPAGSPTSTEEGTSTEPSEGSAPGTSTEPSETGMSQAVQTNGTQPLSKTWELSLYELQRTPQEAITDGLEIVVSPRSLHSELMCPICLDMLKNTMTTKECLHRFCADCIITALRSGNKECPTCRKKLVSKRSLRPDPNFDALISKIYPSRDEYEAHQERVLARINKHNNQQALSHSIEEGLKIQAMNRLQRGKKQQIENGSGAEDNGDSSHCSNASTHSNQEAGPSNKRTKTSDDSGLELDNNNAAMAIDPVMDGASEIELVFRPHPTLMEKDDSAQTRYIKTSGNATVDHLSKYLAVRLALEELRSKGESNQMNLDTASEKQYTIYIATASGQFTVLNGSFSLELVSEKYWKVNKPMELYYAPTKEHK

SEQ ID NO: 1104 - protein, 2471 aa, synthetic construct
  REGION 1..2471: note = Description of Artificial Sequence: Synthetic polypeptide
MGTPKKKRKVMDKKYSIGLAIGTNSVGWAVITDEYKVPSKKFKVLGNTDRHSIKKNLIGALLFDSGETAEATRLKRTARRRYTRRKNRICYLQEIFSNEMAKVDDSFFHRLEESFLVEEDKKHERHPIFGNIVDEVAYHEKYPTIYHLRKKLVDSTDKADLRLIYLALAHMIKFRGHFLIEGDLNPDNSDVDKLFIQLVQTYNQLFEENPINASGVDAKAILSARLSKSRRLENLIAQLPGEKKNGLFGNLIALSLGLTPNFKSNFDLAEDAKLQLSKDTYDDDLDNLLAQIGDQYADLFLAAKNLSDAILLSDILRVNTEITKAPLSASMIKRYDEHHQDLTLLKALVRQQLPEKYKEIFFDQSKNGYAGYIDGGASQEEFYKFIKPILEKMDGTEELLVKLNREDLLRKQRTFDNGSIPHQIHLGELHAILRRQEDFYPFLKDNREKIEKILTFRIPYYVGPLARGNSRFAWMTRKSEETITPWNFEEVVDKGASAQSFIERMTNFDKNLPNEKVLPKHSLLYEYFTVYNELTKVKYVTEGMRKPAFLSGEQKKAIVDLLFKTNRKVTVKQLKEDYFKKIECFDSVEISGVEDRFNASLGTYHDLLKIIKDKDFLDNEENEDILEDIVLTLTLFEDREMIEERLKTYAHLFDDKVMKQLKRRRYTGWGRLSRKLINGIRDKQSGKTILDFLKSDGFANRNFMQLIHDDSLTFKEDIQKAQVSGQGDSLHEHIANLAGSPAIKKGILQTVKVVDELVKVMGRHKPENIVIEMARENQTTQKGQKNSRERMKRIEEGIKELGSQILKEHPVENTQLQNEKLYLYYLQNGRDMYVDQELDINRLSDYDVDAIVPQSFLKDDSIDNKVLTRSDKNRGKSDNVPSEEVVKKMKNYWRQLLNAKLITQRKFDNLTKAERGGLSELDKAGFIKRQLVETRQITKHVAQILDSRMNTKYDENDKLIREVKVITLKSKLVSDFRKDFQFYKVREINNYHHAHDAYLNAVVGTALIKKYPKLESEFVYGDYKVYDVRKMIAKSEQEIGKATAKYFFYSNIMNFFKTEITLANGEIRKRPLIETNGETGEIVWDKGRDFATVRKVLSMPQVNIVKKTEVQTGGFSKESILPKRNSDKLIARKKDWDPKKYGGFDSPTVAYSVLVVAKVEKGKSKKLKSVKELLGITIMERSSFEKNPIDFLEAKGYKEVKKDLIIKLPKYSLFELENGRKRMLASAGELQKGNELALPSKYVNFLYLASHYEKLKGSPEDNEQKQLFVEQHKHYLDEIIEQISEFSKRVILADANLDKVLSAYNKHRDKPIREQAENIIHLFTLTNLGAPAAFKYFDTTIDRKRYTSTKEVLDATLIHQSITGLYETRIDLSQLGGDPKKKRKVGGPSSGAPPPSGGSPAGSPTSTEEGTSESATPESGPGTSTEPSEGSAPGSPAGSPTSTEEGTSTEPSEGSAPGTSTEPSETGMETESEQNSNSTNGSSSSGGSSRPQIAQMSLYERQAVQALQALQRQPNAAQYFHQFMLQQQLSNAQLHSLAAVQQATIAASRQASSPNTSTTQQQTTTTQASINLATTSAAQLISRSQSVSSPSATTLTQSVLLGNTTSPPLNQSQAQMYLRPQLGNLLQVNRTLGRNVPLASQLILMPNGAVAAVQQEVPSAQSPGVHADADQVQNLAVRNQQASAQGPQMQGSTQKAIPPGASPVSSLSQASSQALAVAQASSGATNQSLNLSQAGGGSGNSIPGSMGPGGGGQAHGGLGQLPSSGMGGGSCPRKGTGVVQPLPAAQTVTVSQGSQTEAESAAAKKAEADGSGQQNVGMNLTRTATPAPSQTLISSATYTQIQPHSLIQQQQQIHLQQKQVVIQQQIAIHHQQQFQHRQSQLLHTATHLQLAQQQQQQQQQQQQQQQPQATTLTAPQPPQVPPTQQVPPSQSQQQAQTLVVQPMLQSSPLSLPPDAAPKPPIPIQSKPPVAPIKPPQLGAAKMSAAQQPPPHIPVQVVGTRQPGTAQAQALGLAQLAAAVPTSRGMPGTVQSGQAHLASSPPSSQAPGALQECPPTLAPGMTLAPVQGTAHVVKGGATTSSPVVAQVPAAFYMQSVHLPGKPQTLAVKRKADSEEERDDVSTLGSMLPAKASPVAESPKVMDEKSSLGEKAESVANVNANTPSSELVALTPAPSVPPPTLAMVSRQMGDSKPPQAIVKPQILTHIIEGFVIQEGAEPFPVGCSQLLKESEKPLQTGLPTGLTENQSGGPLGVDSPSAELDKKANLLKCEYCGKYAPAEQFRGSKRFCSMTCAKRYNVSCSHQFRLKRKKMKEFQEANYARVRRRGPRRSSSDIARAKIQGKCHRGQEDSSRGSDNSSYDEALSPTSPGPLSVRAGHGERDLGNPNTAPPTPELHGINPVFLSSNPSRWSVEEVYEFIASLQGCQEIAEEFRSQEIDGQALLLLKEEHLMSAMNIKLGPALKICAKINVLKET

SEQ ID NO: 1105 - protein, 1793 aa, synthetic construct
  REGION 1..1793: note = Description of Artificial Sequence: Synthetic polypeptide
MGTPKKKRKVMDKKYSIGLAIGTNSVGWAVITDEYKVPSKKFKVLGNTDRHSIKKNLIGALLFDSGETAEATRLKRTARRRYTRRKNRICYLQEIFSNEMAKVDDSFFHRLEESFLVEEDKKHERHPIFGNIVDEVAYHEKYPTIYHLRKKLVDSTDKADLRLIYLALAHMIKFRGHFLIEGDLNPDNSDVDKLFIQLVQTYNQLFEENPINASGVDAKAILSARLSKSRRLENLIAQLPGEKKNGLFGNLIALSLGLTPNFKSNFDLAEDAKLQLSKDTYDDDLDNLLAQIGDQYADLFLAAKNLSDAILLSDILRVNTEITKAPLSASMIKRYDEHHQDLTLLKALVRQQLPEKYKEIFFDQSKNGYAGYIDGGASQEEFYKFIKPILEKMDGTEELLVKLNREDLLRKQRTFDNGSIPHQIHLGELHAILRRQEDFYPFLKDNREKIEKILTFRIPYYVGPLARGNSRFAWMTRKSEETITPWNFEEVVDKGASAQSFIERMTNFDKNLPNEKVLPKHSLLYEYFTVYNELTKVKYVTEGMRKPAFLSGEQKKAIVDLLFKTNRKVTVKQLKEDYFKKIECFDSVEISGVEDRFNASLGTYHDLLKIIKDKDFLDNEENEDILEDIVLTLTLFEDREMIEERLKTYAHLFDDKVMKQLKRRRYTGWGRLSRKLINGIRDKQSGKTILDFLKSDGFANRNFMQLIHDDSLTFKEDIQKAQVSGQGDSLHEHIANLAGSPAIKKGILQTVKVVDELVKVMGRHKPENIVIEMARENQTTQKGQKNSRERMKRIEEGIKELGSQILKEHPVENTQLQNEKLYLYYLQNGRDMYVDQELDINRLSDYDVDAIVPQSFLKDDSIDNKVLTRSDKNRGKSDNVPSEEVVKKMKNYWRQLLNAKLITQRKFDNLTKAERGGLSELDKAGFIKRQLVETRQITKHVAQILDSRMNTKYDENDKLIREVKVITLKSKLVSDFRKDFQFYKVREINNYHHAHDAYLNAVVGTALIKKYPKLESEFVYGDYKVYDVRKMIAKSEQEIGKATAKYFFYSNIMNFFKTEITLANGEIRKRPLIETNGETGEIVWDKGRDFATVRKVLSMPQVNIVKKTEVQTGGFSKESILPKRNSDKLIARKKDWDPKKYGGFDSPTVAYSVLVVAKVEKGKSKKLKSVKELLGITIMERSSFEKNPIDFLEAKGYKEVKKDLIIKLPKYSLFELENGRKRMLASAGELQKGNELALPSKYVNFLYLASHYEKLKGSPEDNEQKQLFVEQHKHYLDEIIEQISEFSKRVILADANLDKVLSAYNKHRDKPIREQAENIIHLFTLTNLGAPAAFKYFDTTIDRKRYTSTKEVLDATLIHQSITGLYETRIDLSQLGGDPKKKRKVGGPSSGAPPPSGGSPAGSPTSTEEGTSESATPESGPGTSTEPSEGSAPGSPAGSPTSTEEGTSTEPSEGSAPGTSTEPSETGMHRTTRIKITELNPHLMCVLCGGYFIDATTIIECLHSFCKTCIVRYLETSKYCPICDVQVHKTRPLLNIRSDKTLQDIVYKLVPGLFKNEMKRRRDFYAAHPSADAANGSNEDRGEVADEDKRIITDDEIISLSIEFFDQNRLDRKVNKDKEKSKEEVNDKRYLRCPAAMTVMHLRKFLRSKMDIPNTFQIDVMYEEEPLKDYYTLMDIAYIYTWRRNGPLPLKYRVRPTCKRMKISHQRDGLTNAGELESDSGSDKANSPAGGIPSTSSCLPSPSTPVQSPHPQFPHISSTMNGTSNSPSGNHQSSFANRPRKSSVNGSSATSSG

SEQ ID NO: 1106 - protein, 1892 aa, synthetic construct
  REGION 1..1892: note = Description of Artificial Sequence: Synthetic polypeptide
MGTPKKKRKVMDKKYSIGLAIGTNSVGWAVITDEYKVPSKKFKVLGNTDRHSIKKNLIGALLFDSGETAEATRLKRTARRRYTRRKNRICYLQEIFSNEMAKVDDSFFHRLEESFLVEEDKKHERHPIFGNIVDEVAYHEKYPTIYHLRKKLVDSTDKADLRLIYLALAHMIKFRGHFLIEGDLNPDNSDVDKLFIQLVQTYNQLFEENPINASGVDAKAILSARLSKSRRLENLIAQLPGEKKNGLFGNLIALSLGLTPNFKSNFDLAEDAKLQLSKDTYDDDLDNLLAQIGDQYADLFLAAKNLSDAILLSDILRVNTEITKAPLSASMIKRYDEHHQDLTLLKALVRQQLPEKYKEIFFDQSKNGYAGYIDGGASQEEFYKFIKPILEKMDGTEELLVKLNREDLLRKQRTFDNGSIPHQIHLGELHAILRRQEDFYPFLKDNREKIEKILTFRIPYYVGPLARGNSRFAWMTRKSEETITPWNFEEVVDKGASAQSFIERMTNFDKNLPNEKVLPKHSLLYEYFTVYNELTKVKYVTEGMRKPAFLSGEQKKAIVDLLFKTNRKVTVKQLKEDYFKKIECFDSVEISGVEDRFNASLGTYHDLLKIIKDKDFLDNEENEDILEDIVLTLTLFEDREMIEERLKTYAHLFDDKVMKQLKRRRYTGWGRLSRKLINGIRDKQSGKTILDFLKSDGFANRNFMQLIHDDSLTFKEDIQKAQVSGQGDSLHEHIANLAGSPAIKKGILQTVKVVDELVKVMGRHKPENIVIEMARENQTTQKGQKNSRERMKRIEEGIKELGSQILKEHPVENTQLQNEKLYLYYLQNGRDMYVDQELDINRLSDYDVDAIVPQSFLKDDSIDNKVLTRSDKNRGKSDNVPSEEVVKKMKNYWRQLLNAKLITQRKFDNLTKAERGGLSELDKAGFIKRQLVETRQITKHVAQILDSRMNTKYDENDKLIREVKVITLKSKLVSDFRKDFQFYKVREINNYHHAHDAYLNAVVGTALIKKYPKLESEFVYGDYKVYDVRKMIAKSEQEIGKATAKYFFYSNIMNFFKTEITLANGEIRKRPLIETNGETGEIVWDKGRDFATVRKVLSMPQVNIVKKTEVQTGGFSKESILPKRNSDKLIARKKDWDPKKYGGFDSPTVAYSVLVVAKVEKGKSKKLKSVKELLGITIMERSSFEKNPIDFLEAKGYKEVKKDLIIKLPKYSLFELENGRKRMLASAGELQKGNELALPSKYVNFLYLASHYEKLKGSPEDNEQKQLFVEQHKHYLDEIIEQISEFSKRVILADANLDKVLSAYNKHRDKPIREQAENIIHLFTLTNLGAPAAFKYFDTTIDRKRYTSTKEVLDATLIHQSITGLYETRIDLSQLGGDPKKKRKVGGPSSGAPPPSGGSPAGSPTSTEEGTSESATPESGPGTSTEPSEGSAPGSPAGSPTSTEEGTSTEPSEGSAPGTSTEPSETGMADKEAAFDDAVEERVINEEYKIWKKNTPFLYDLVMTHALEWPSLTAQWLPDVTRPEGKDFSIHRLVLGTHTSDEQNHLVIASVQLPNDDAQFDASHYDSEKGEFGGFGSVSGKIEIEIKINHEGEVNRARYMPQNPCIIATKTPSSDVLVFDYTKHPSKPDPSGECNPDLRLRGHQKEGYGLSWNPNLSGHLLSASDDHTICLWDISAVPKEGKVVDAKTIFTGHTAVVEDVSWHLLHESLFGSVADDQKLMIWDTRSNNTSKPSHSVDAHTAEVNCLSFNPYSEFILATGSADKTVALWDLRNLKLKLHSFESHKDEIFQVQWSPHNETILASSGTDRRLNVWDLSKIGEEQSPEDAEDGPPELLFIHGGHTAKISDFSWNPNEPWVICSVSEDNIMQVWQMAENIYNDEDPEGSVDPEGQGS

SEQ ID NO: 1107 - protein, 1892 aa, synthetic construct
  REGION 1..1892: note = Description of Artificial Sequence: Synthetic polypeptide
MGTPKKKRKVMDKKYSIGLAIGTNSVGWAVITDEYKVPSKKFKVLGNTDRHSIKKNLIGALLFDSGETAEATRLKRTARRRYTRRKNRICYLQEIFSNEMAKVDDSFFHRLEESFLVEEDKKHERHPIFGNIVDEVAYHEKYPTIYHLRKKLVDSTDKADLRLIYLALAHMIKFRGHFLIEGDLNPDNSDVDKLFIQLVQTYNQLFEENPINASGVDAKAILSARLSKSRRLENLIAQLPGEKKNGLFGNLIALSLGLTPNFKSNFDLAEDAKLQLSKDTYDDDLDNLLAQIGDQYADLFLAAKNLSDAILLSDILRVNTEITKAPLSASMIKRYDEHHQDLTLLKALVRQQLPEKYKEIFFDQSKNGYAGYIDGGASQEEFYKFIKPILEKMDGTEELLVKLNREDLLRKQRTFDNGSIPHQIHLGELHAILRRQEDFYPFLKDNREKIEKILTFRIPYYVGPLARGNSRFAWMTRKSEETITPWNFEEVVDKGASAQSFIERMTNFDKNLPNEKVLPKHSLLYEYFTVYNELTKVKYVTEGMRKPAFLSGEQKKAIVDLLFKTNRKVTVKQLKEDYFKKIECFDSVEISGVEDRFNASLGTYHDLLKIIKDKDFLDNEENEDILEDIVLTLTLFEDREMIEERLKTYAHLFDDKVMKQLKRRRYTGWGRLSRKLINGIRDKQSGKTILDFLKSDGFANRNFMQLIHDDSLTFKEDIQKAQVSGQGDSLHEHIANLAGSPAIKKGILQTVKVVDELVKVMGRHKPENIVIEMARENQTTQKGQKNSRERMKRIEEGIKELGSQILKEHPVENTQLQNEKLYLYYLQNGRDMYVDQELDINRLSDYDVDAIVPQSFLKDDSIDNKVLTRSDKNRGKSDNVPSEEVVKKMKNYWRQLLNAKLITQRKFDNLTKAERGGLSELDKAGFIKRQLVETRQITKHVAQILDSRMNTKYDENDKLIREVKVITLKSKLVSDFRKDFQFYKVREINNYHHAHDAYLNAVVGTALIKKYPKLESEFVYGDYKVYDVRKMIAKSEQEIGKATAKYFFYSNIMNFFKTEITLANGEIRKRPLIETNGETGEIVWDKGRDFATVRKVLSMPQVNIVKKTEVQTGGFSKESILPKRNSDKLIARKKDWDPKKYGGFDSPTVAYSVLVVAKVEKGKSKKLKSVKELLGITIMERSSFEKNPIDFLEAKGYKEVKKDLIIKLPKYSLFELENGRKRMLASAGELQKGNELALPSKYVNFLYLASHYEKLKGSPEDNEQKQLFVEQHKHYLDEIIEQISEFSKRVILADANLDKVLSAYNKHRDKPIREQAENIIHLFTLTNLGAPAAFKYFDTTIDRKRYTSTKEVLDATLIHQSITGLYETRIDLSQLGGDPKKKRKVGGPSSGAPPPSGGSPAGSPTSTEEGTSESATPESGPGTSTEPSEGSAPGSPAGSPTSTEEGTSTEPSEGSAPGTSTEPSETGMASKEMFEDTVEERVINEEYKIWKKNTPFLYDLVMTHALQWPSLTVQWLPEVTKPEGKDYALHWLVLGTHTSDEQNHLVVARVHIPNDDAQFDASHCDSDKGEFGGFGSVTGKIECEIKINHEGEVNRARYMPQNPHIIATKTPSSDVLVFDYTKHPAKPDPSGECNPDLRLRGHQKEGYGLSWNSNLSGHLLSASDDHTVCLWDINAGPKEGKIVDAKAIFTGHSAVVEDVAWHLLHESLFGSVADDQKLMIWDTRSNTTSKPSHLVDAHTAEVNCLSFNPYSEFILATGSADKTVALWDLRNLKLKLHTFESHKDEIFQVHWSPHNETILASSGTDRRLNVWDLSKIGEEQSAEDAEDGPPELLFIHGGHTAKISDFSWNPNEPWVICSVSEDNIMQIWQMAENIYNDEESDVTTSELEGQGS

SEQ ID NO: 1108 - protein, 2564 aa, synthetic construct
  REGION 1..2564: note = Description of Artificial Sequence: Synthetic polypeptide
MGTPKKKRKVMDKKYSIGLAIGTNSVGWAVITDEYKVPSKKFKVLGNTDRHSIKKNLIGALLFDSGETAEATRLKRTARRRYTRRKNRICYLQEIFSNEMAKVDDSFFHRLEESFLVEEDKKHERHPIFGNIVDEVAYHEKYPTIYHLRKKLVDSTDKADLRLIYLALAHMIKFRGHFLIEGDLNPDNSDVDKLFIQLVQTYNQLFEENPINASGVDAKAILSARLSKSRRLENLIAQLPGEKKNGLFGNLIALSLGLTPNFKSNFDLAEDAKLQLSKDTYDDDLDNLLAQIGDQYADLFLAAKNLSDAILLSDILRVNTEITKAPLSASMIKRYDEHHQDLTLLKALVRQQLPEKYKEIFFDQSKNGYAGYIDGGASQEEFYKFIKPILEKMDGTEELLVKLNREDLLRKQRTFDNGSIPHQIHLGELHAILRRQEDFYPFLKDNREKIEKILTFRIPYYVGPLARGNSRFAWMTRKSEETITPWNFEEVVDKGASAQSFIERMTNFDKNLPNEKVLPKHSLLYEYFTVYNELTKVKYVTEGMRKPAFLSGEQKKAIVDLLFKTNRKVTVKQLKEDYFKKIECFDSVEISGVEDRFNASLGTYHDLLKIIKDKDFLDNEENEDILEDIVLTLTLFEDREMIEERLKTYAHLFDDKVMKQLKRRRYTGWGRLSRKLINGIRDKQSGKTILDFLKSDGFANRNFMQLIHDDSLTFKEDIQKAQVSGQGDSLHEHIANLAGSPAIKKGILQTVKVVDELVKVMGRHKPENIVIEMARENQTTQKGQKNSRERMKRIEEGIKELGSQILKEHPVENTQLQNEKLYLYYLQNGRDMYVDQELDINRLSDYDVDAIVPQSFLKDDSIDNKVLTRSDKNRGKSDNVPSEEVVKKMKNYWRQLLNAKLITQRKFDNLTKAERGGLSELDKAGFIKRQLVETRQITKHVAQILDSRMNTKYDENDKLIREVKVITLKSKLVSDFRKDFQFYKVREINNYHHAHDAYLNAVVGTALIKKYPKLESEFVYGDYKVYDVRKMIAKSEQEIGKATAKYFFYSNIMNFFKTEITLANGEIRKRPLIETNGETGEIVWDKGRDFATVRKVLSMPQVNIVKKTEVQTGGFSKESILPKRNSDKLIARKKDWDPKKYGGFDSPTVAYSVLVVAKVEKGKSKKLKSVKELLGITIMERSSFEKNPIDFLEAKGYKEVKKDLIIKLPKYSLFELENGRKRMLASAGELQKGNELALPSKYVNFLYLASHYEKLKGSPEDNEQKQLFVEQHKHYLDEIIEQISEFSKRVILADANLDKVLSAYNKHRDKPIREQAENIIHLFTLTNLGAPAAFKYFDTTIDRKRYTSTKEVLDATLIHQSITGLYETRIDLSQLGGDPKKKRKVGGPSSGAPPPSGGSPAGSPTSTEEGTSESATPESGPGTSTEPSEGSAPGSPAGSPTSTEEGTSTEPSEGSAPGTSTEPSETGMATQVMGQSSGGGGLFTSSGNIGMALPNDMYDLHDLSKAELAAPQLIMLANVALTGEVNGSCCDYLVGEERQMAELMPVGDNNFSDSEEGEGLEESADIKGEPHGLENMELRSLELSVVEPQPVFEASGAPDIYSSNKDLPPETPGAEDKGKSSKTKPFRCKPCQYEAESEEQFVHHIRVHSAKKFFVEESAEKQAKARESGSSTAEEGDFSKGPIRCDRCGYNTNRYDHYTAHLKHHTRAGDNERVYKCIICTYTTVSEYHWRKHLRNHFPRKVYTCGKCNYFSDRKNNYVQHVRTHTGERPYKCELCPYSSSQKTHLTRHMRTHSGEKPFKCDQCSYVASNQHEVTRHARQVHNGPKPLNCPHCDYKTADRSNFKKHVELHVNPRQFNCPVCDYAASKKCNLQYHFKSKHPTCPNKTMDVSKVKLKKTKKREADLPDNITNEKTEIEQTKIKGDVAGKKNEKSVKAEKRDVSKEKKPSNNVSVIQVTTRTRKSVTEVKEMDVHTGSNSEKFSKTKKSKRKLEVDSHSLHGPVNDEESSTKKKKKVESKSKNNSQEVPKGDSKVEENKKQNTCMKKSTKKKTLKNKSSKKSSKPPQKEPVEKGSAQMDPPQMGPAPTEAVQKGPVQVEPPPPMEHAQMEGAQIRPAPDEPVQMEVVQEGPAQKELLPPVEPAQMVGAQIVLAHMELPPPMETAQTEVAQMGPAPMEPAQMEVAQVESAPMQVVQKEPVQMELSPPMEVVQKEPVQIELSPPMEVVQKEPVKIELSPPIEVVQKEPVQMELSPPMGVVQKEPAQREPPPPREPPLHMEPISKKPPLRKDKKEKSNMQSERARKEQVLIEVGLVPVKDSWLLKESVSTEDLSPPSPPLPKENLREEASGDQKLLNTGEGNKEAPLQKVGAEEADESLPGLAANINESTHISSSGQNLNTPEGETLNGKHQTDSIVCEMKMDTDQNTRENLTGINSTVEEPVSPMLPPSAVEEREAVSKTALASPPATMAANESQEIDEDEGIHSHEGSDLSDNMSEGSDDSGLHGARPVPQESSRKNAKEALAVKAAKGDFVCIFCDRSFRKGKDYSKHLNRHLVNVYYLEEAAQGQE

SEQ ID NO: 1109 - protein, 1952 aa, synthetic construct
  REGION 1..1952: note = Description of Artificial Sequence: Synthetic polypeptide
MGTPKKKRKVMDKKYSIGLAIGTNSVGWAVITDEYKVPSKKFKVLGNTDRHSIKKNLIGALLFDSGETAEATRLKRTARRRYTRRKNRICYLQEIFSNEMAKVDDSFFHRLEESFLVEEDKKHERHPIFGNIVDEVAYHEKYPTIYHLRKKLVDSTDKADLRLIYLALAHMIKFRGHFLIEGDLNPDNSDVDKLFIQLVQTYNQLFEENPINASGVDAKAILSARLSKSRRLENLIAQLPGEKKNGLFGNLIALSLGLTPNFKSNFDLAEDAKLQLSKDTYDDDLDNLLAQIGDQYADLFLAAKNLSDAILLSDILRVNTEITKAPLSASMIKRYDEHHQDLTLLKALVRQQLPEKYKEIFFDQSKNGYAGYIDGGASQEEFYKFIKPILEKMDGTEELLVKLNREDLLRKQRTFDNGSIPHQIHLGELHAILRRQEDFYPFLKDNREKIEKILTFRIPYYVGPLARGNSRFAWMTRKSEETITPWNFEEVVDKGASAQSFIERMTNFDKNLPNEKVLPKHSLLYEYFTVYNELTKVKYVTEGMRKPAFLSGEQKKAIVDLLFKTNRKVTVKQLKEDYFKKIECFDSVEISGVEDRFNASLGTYHDLLKIIKDKDFLDNEENEDILEDIVLTLTLFEDREMIEERLKTYAHLFDDKVMKQLKRRRYTGWGRLSRKLINGIRDKQSGKTILDFLKSDGFANRNFMQLIHDDSLTFKEDIQKAQVSGQGDSLHEHIANLAGSPAIKKGILQTVKVVDELVKVMGRHKPENIVIEMARENQTTQKGQKNSRERMKRIEEGIKELGSQILKEHPVENTQLQNEKLYLYYLQNGRDMYVDQELDINRLSDYDVDAIVPQSFLKDDSIDNKVLTRSDKNRGKSDNVPSEEVVKKMKNYWRQLLNAKLITQRKFDNLTKAERGGLSELDKAGFIKRQLVETRQITKHVAQILDSRMNTKYDENDKLIREVKVITLKSKLVSDFRKDFQFYKVREINNYHHAHDAYLNAVVGTALIKKYPKLESEFVYGDYKVYDVRKMIAKSEQEIGKATAKYFFYSNIMNFFKTEITLANGEIRKRPLIETNGETGEIVWDKGRDFATVRKVLSMPQVNIVKKTEVQTGGFSKESILPKRNSDKLIARKKDWDPKKYGGFDSPTVAYSVLVVAKVEKGKSKKLKSVKELLGITIMERSSFEKNPIDFLEAKGYKEVKKDLIIKLPKYSLFELENGRKRMLASAGELQKGNELALPSKYVNFLYLASHYEKLKGSPEDNEQKQLFVEQHKHYLDEIIEQISEFSKRVILADANLDKVLSAYNKHRDKPIREQAENIIHLFTLTNLGAPAAFKYFDTTIDRKRYTSTKEVLDATLIHQSITGLYETRIDLSQLGGDPKKKRKVGGPSSGAPPPSGGSPAGSPTSTEEGTSESATPESGPGTSTEPSEGSAPGSPAGSPTSTEEGTSTEPSEGSAPGTSTEPSETGMPAMVEKGPEVSGKRRGRNNAAASASAAAASAAASAACASPAATAASGAAASSASAAAASAAAAPNNGQNKSLAAAAPNGNSSSNSWEEGSSGSSSDEEHGGGGMRVGPQYQAVVPDFDPAKLARRSQERDNLGMLVWSPNQNLSEAKLDEYIAIAKEKHGYNMEQALGMLFWHKHNIEKSLADLPNFTPFPDEWTVEDKVLFEQAFSFHGKTFHRIQQMLPDKSIASLVKFYYSWKKTRTKTSVMDRHARKQKREREESEDELEEANGNNPIDIEVDQNKESKKEVPPTETVPQVKKEKHSTQAKNRAKRKPPKGMFLSQEDVEAVSANATAATTVLRQLDMELVSVKRQIQNIKQTNSALKEKLDGGIEPYRLPEVIQKCNARWTTEEQLLAVQAIRKYGRDFQAISDVIGNKSVVQVKNFFVNYRRRFNIDEVLQEWEAEHGKEETNGPSNQKPVKSPDNSIKMPEEEDEAPVLDVRYASAS

SEQ ID NO: 1110 - protein, 2740 aa, synthetic construct
  REGION 1..2740: note = Description of Artificial Sequence: Synthetic polypeptide
MGTPKKKRKVMDKKYSIGLAIGTNSVGWAVITDEYKVPSKKFKVLGNTDRHSIKKNLIGALLFDSGETAEATRLKRTARRRYTRRKNRICYLQEIFSNEMAKVDDSFFHRLEESFLVEEDKKHERHPIFGNIVDEVAYHEKYPTIYHLRKKLVDSTDKADLRLIYLALAHMIKFRGHFLIEGDLNPDNSDVDKLFIQLVQTYNQLFEENPINASGVDAKAILSARLSKSRRLENLIAQLPGEKKNGLFGNLIALSLGLTPNFKSNFDLAEDAKLQLSKDTYDDDLDNLLAQIGDQYADLFLAAKNLSDAILLSDILRVNTEITKAPLSASMIKRYDEHHQDLTLLKALVRQQLPEKYKEIFFDQSKNGYAGYIDGGASQEEFYKFIKPILEKMDGTEELLVKLNREDLLRKQRTFDNGSIPHQIHLGELHAILRRQEDFYPFLKDNREKIEKILTFRIPYYVGPLARGNSRFAWMTRKSEETITPWNFEEVVDKGASAQSFIERMTNFDKNLPNEKVLPKHSLLYEYFTVYNELTKVKYVTEGMRKPAFLSGEQKKAIVDLLFKTNRKVTVKQLKEDYFKKIECFDSVEISGVEDRFNASLGTYHDLLKIIKDKDFLDNEENEDILEDIVLTLTLFEDREMIEERLKTYAHLFDDKVMKQLKRRRYTGWGRLSRKLINGIRDKQSGKTILDFLKSDGFANRNFMQLIHDDSLTFKEDIQKAQVSGQGDSLHEHIANLAGSPAIKKGILQTVKVVDELVKVMGRHKPENIVIEMARENQTTQKGQKNSRERMKRIEEGIKELGSQILKEHPVENTQLQNEKLYLYYLQNGRDMYVDQELDINRLSDYDVDAIVPQSFLKDDSIDNKVLTRSDKNRGKSDNVPSEEVVKKMKNYWRQLLNAKLITQRKFDNLTKAERGGLSELDKAGFIKRQLVETRQITKHVAQILDSRMNTKYDENDKLIREVKVITLKSKLVSDFRKDFQFYKVREINNYHHAHDAYLNAVVGTALIKKYPKLESEFVYGDYKVYDVRKMIAKSEQEIGKATAKYFFYSNIMNFFKTEITLANGEIRKRPLIETNGETGEIVWDKGRDFATVRKVLSMPQVNIVKKTEVQTGGFSKESILPKRNSDKLIARKKDWDPKKYGGFDSPTVAYSVLVVAKVEKGKSKKLKSVKELLGITIMERSSFEKNPIDFLEAKGYKEVKKDLIIKLPKYSLFELENGRKRMLASAGELQKGNELALPSKYVNFLYLASHYEKLKGSPEDNEQKQLFVEQHKHYLDEIIEQISEFSKRVILADANLDKVLSAYNKHRDKPIREQAENIIHLFTLTNLGAPAAFKYFDTTIDRKRYTSTKEVLDATLIHQSITGLYETRIDLSQLGGDPKKKRKVGGPSSGAPPPSGGSPAGSPTSTEEGTSESATPESGPGTSTEPSEGSAPGSPAGSPTSTEEGTSTEPSEGSAPGTSTEPSETGMKRRLDDQESPVYAAQQRRIPGSTEAFPHQHRVLAPAPPVYEAVSETMQSATGIQYSVTPSYQVSAMPQSSGSHGPAIAAVHSSHHHPTAVQPHGGQVVQSHAHPAPPVAPVQGQQQFQRLKVEDALSYLDQVKLQFGSQPQVYNDFLDIMKEFKSQSIDTPGVISRVSQLFKGHPDLIMGFNTFLPPGYKIEVQTNDMVNVTTPGQVHQIPTHGIQPQPQPPPQHPSQPSAQSAPAPAQPAPQPPPAKVSKPSQLQAHTPASQQTPPLPPYASPRSPPVQPHTPVTISLGTAPSLQNNQPVEFNHAINYVNKIKNRFQGQPDIYKAFLEILHTYQKEQRNAKEAGGNYTPALTEQEVYAQVARLFKNQEDLLSEFGQFLPDANSSVLLSKTTAEKVDSVRNDHGGTVKKPQLNNKPQRPSQNGCQIRRHPTGTTPPVKKKPKLLNLKDSSMADASKHGGGTESLFFDKVRKALRSAEAYENFLRCLVIFNQEVISRAELVQLVSPFLGKFPELFNWFKNFLGYKESVHLETYPKERATEGIAMEIDYASCKRLGSSYRALPKSYQQPKCTGRTPLCKEVLNDTWVSFPSWSEDSTFVSSKKTQYEEHIYRCEDERFELDVVLETNLATIRVLEAIQKKLSRLSAEEQAKFRLDNTLGGTSEVIHRKALQRIYADKAADIIDGLRKNPSIAVPIVLKRLKMKEEEWREAQRGFNKVWREQNEKYYLKSLDHQGINFKQNDTKVLRSKSLLNEIESIYDERQEQATEENAGVPVGPHLSLAYEDKQILEDAAALIIHHVKRQTGIQKEDKYKIKQIMHHFIPDLLFAQRGDLSDVEEEEEEEMDVDEATGAVKKHNGVGGSPPKSKLLFSNTAAQKLRGMDEVYNLFYVNNNWYIFMRLHQILCLRLLRICSQAERQIEEENREREWEREVLGIKRDKSDSPAIQLRLKEPMDVDVEDYYPAFLDMVRSLLDGNIDSSQYEDSLREMFTIHAYIAFTMDKLIQSIVRQLQHIVSDEICVQVTDLYLAENNNGATGGQLNTQNSRSLLESTYQRKAEQLMSDENCFKLMFIQSQGQVQLTIELLDTEEENSDDPVEAERWSDYVERYMNSDTTSPELREHLAQKPVFLPRNLRRIRKCQRGREQQEKEGKEGNSKKTMENVDSLDKLECRFKLNSYKMVYVIKSEDYMYRRTALLRAHQSHERVSKRLHQRFQAWVDKWTKEHVPREMAAETSKWLMGEGLEGLVPCTTTCDTETLHFVSINKYRVKYGTVFKAP

SEQ ID NO: 1111 - protein, 2589 aa, synthetic construct
  REGION 1..2589: note = Description of Artificial Sequence: Synthetic polypeptide
MGTPKKKRKVMDKKYSIGLAIGTNSVGWAVITDEYKVPSKKFKVLGNTDRHSIKKNLIGALLFDSGETAEATRLKRTARRRYTRRKNRICYLQEIFSNEMAKVDDSFFHRLEESFLVEEDKKHERHPIFGNIVDEVAYHEKYPTIYHLRKKLVDSTDKADLRLIYLALAHMIKFRGHFLIEGDLNPDNSDVDKLFIQLVQTYNQLFEENPINASGVDAKAILSARLSKSRRLENLIAQLPGEKKNGLFGNLIALSLGLTPNFKSNFDLAEDAKLQLSKDTYDDDLDNLLAQIGDQYADLFLAAKNLSDAILLSDILRVNTEITKAPLSASMIKRYDEHHQDLTLLKALVRQQLPEKYKEIFFDQSKNGYAGYIDGGASQEEFYKFIKPILEKMDGTEELLVKLNREDLLRKQRTFDNGSIPHQIHLGELHAILRRQEDFYPFLKDNREKIEKILTFRIPYYVGPLARGNSRFAWMTRKSEETITPWNFEEVVDKGASAQSFIERMTNFDKNLPNEKVLPKHSLLYEYFTVYNELTKVKYVTEGMRKPAFLSGEQKKAIVDLLFKTNRKVTVKQLKEDYFKKIECFDSVEISGVEDRFNASLGTYHDLLKIIKDKDFLDNEENEDILEDIVLTLTLFEDREMIEERLKTYAHLFDDKVMKQLKRRRYTGWGRLSRKLINGIRDKQSGKTILDFLKSDGFANRNFMQLIHDDSLTFKEDIQKAQVSGQGDSLHEHIANLAGSPAIKKGILQTVKVVDELVKVMGRHKPENIVIEMARENQTTQKGQKNSRERMKRIEEGIKELGSQILKEHPVENTQLQNEKLYLYYLQNGRDMYVDQELDINRLSDYDVDAIVPQSFLKDDSIDNKVLTRSDKNRGKSDNVPSEEVVKKMKNYWRQLLNAKLITQRKFDNLTKAERGGLSELDKAGFIKRQLVETRQITKHVAQILDSRMNTKYDENDKLIREVKVITLKSKLVSDFRKDFQFYKVREINNYHHAHDAYLNAVVGTALIKKYPKLESEFVYGDYKVYDVRKMIAKSEQEIGKATAKYFFYSNIMNFFKTEITLANGEIRKRPLIETNGETGEIVWDKGRDFATVRKVLSMPQVNIVKKTEVQTGGFSKESILPKRNSDKLIARKKDWDPKKYGGFDSPTVAYSVLVVAKVEKGKSKKLKSVKELLGITIMERSSFEKNPIDFLEAKGYKEVKKDLIIKLPKYSLFELENGRKRMLASAGELQKGNELALPSKYVNFLYLASHYEKLKGSPEDNEQKQLFVEQHKHYLDEIIEQISEFSKRVILADANLDKVLSAYNKHRDKPIREQAENIIHLFTLTNLGAPAAFKYFDTTIDRKRYTSTKEVLDATLIHQSITGLYETRIDLSQLGGDPKKKRKVGGPSSGAPPPSGGSPAGSPTSTEEGTSESATPESGPGTSTEPSEGSAPGSPAGSPTSTEEGTSTEPSEGSAPGTSTEPSETGMNSPNESDGMSGREPSLEILPRTSLHSIPVTVEVKPVLPRAMPSSMGGGGGGSPSPVELRGALVGSVDPTLREQQLQQELLALKQQQQLQKQLLFAEFQKQHDHLTRQHEVQLQKHLKQQQEMLAAKQQQEMLAAKRQQELEQQRQREQQRQEELEKQRLEQQLLILRNKEKSKESAIASTEVKLRLQEFLLSKSKEPTPGGLNHSLPQHPKCWGAHHASLDQSSPPQSGPPGTPPSYKLPLPGPYDSRDDFPLRKTASEPNLKVRSRLKQKVAERRSSPLLRRKDGTVISTFKKRAVEITGAGPGASSVCNSAPGSGPSSPNSSHSTIAENGFTGSVPNIPTEMLPQHRALPLDSSPNQFSLYTSPSLPNISLGLQATVTVTNSHLTASPKLSTQQEAERQALQSLRQGGTLTGKFMSTSSIPGCLLGVALEGDGSPHGHASLLQHVLLLEQARQQSTLIAVPLHGQSPLVTGERVATSMRTVGKLPRHRPLSRTQSSPLPQSPQALQQLVMQQQHQQFLEKQKQQQLQLGKILTKTGELPRQPTTHPEETEEELTEQQEVLLGEGALTMPREGSTESESTQEDLEEEDEEDDGEEEEDCIQVKDEEGESGAEEGPDLEEPGAGYKKLFSDAQPLQPLQVYQAPLSLATVPHQALGRTQSSPAAPGGMKSPPDQPVKHLFTTGVVYDTFMLKHQCMCGNTHVHPEHAGRIQSIWSRLQETGLLSKCERIRGRKATLDEIQTVHSEYHTLLYGTSPLNRQKLDSKKLLGPISQKMYAVLPCGGIGVDSDTVWNEMHSSSAVRMAVGCLLELAFKVAAGELKNGFAIIRPPGHHAEESTAMGFCFFNSVAITAKLLQQKLNVGKVLIVDWDIHHGNGTQQAFYNDPSVLYISLHRYDNGNFFPGSGAPEEVGGGPGVGYNVNVAWTGGVDPPIGDVEYLTAFRTVVMPIAHEFSPDVVLVSAGFDAVEGHLSPLGGYSVTARCFGHLTRQLMTLAGGRVVLALEGGHDLTAICDASEACVSALLSVELQPLDEAVLQQKPNINAVATLEKVIEIQSKHWSCVQKFAAGLGRSLREAQAGETEEAETVSAMALLSVGAEQAQAAAAREHSPRPAEEPMEQEPAL

SEQ ID NO: 1112 - protein, 3077 aa, synthetic construct
  REGION 1..3077: note = Description of Artificial Sequence: Synthetic polypeptide
MPARTAPARVPTLAVPAISLPDDVRRRLKDLERDSLTEKECVKEKLNLLHEFLQTEIKNQLCDLETKLRKEELSEEGYLAKVKSLLNKDLSLENGAHAYNREVNGRLENGNQARSEARRVGMADANSPPKPLSKPRTPRRSKSDGEAKPEPSPSPRITRKSTRQTTITSHFAKGPAKRKPQEESERAKSDESIKEEDKDQDEKRRRVTSRERVARPLPAEEPERAKSGTRTEKEEERDEKEEKRLRSQTKEPTPKQKLKEEPDREARAGVQADEDEDGDEKDEKKHRSQPKDLAAKRRPEEKEPEKVNPQISDEKDEDEKEEKRRKTTPKEPTEKKMARAKTVMNSKTHPPKCIQCGQYLDDPLKYGQHPPDAVDEPQMLTNEKLSIFDANESGFESYEALPQHKLTCFSVYCKHGHLCPIDTGLIEKNIELFFSGSAKPIYDDDPSLEGGVNGKNLGPINEWWITGFDGGEKALIGFSTSFAEYILMDPSPEYAPIFGLMQEKIYISKIVVEFLQSNSDSTYEDLINKIETTVPPSGLNLNRFTEDSLLRHAQFVVEQVESYDEAGDSDEQPIFLTPCMRDLIKLAGVTLGQRRAQARRQTIRHSTREKDRGPTKATTTKLVYQIFDTFFAEQIEKDDREDKENAFKRRRCGVCEVCQQPECGKCKACKDMVKFGGSGRSKQACQERRCPNMAMKEADDDEEVDDNIPEMPSPKKMHQGKKKKQNKNRISWVGEAVKTDGKKSYYKKVCIDAETLEVGDCVSVIPDDSSKPLYLARVTALWEDSSNGQMFHAHWFCAGTDTVLGATSDPLELFLVDECEDMQLSYIHSKVKVIYKAPSENWAMEGGMDPESLLEGDDGKTYFYQLWYDQDYARFESPPKTQPTEDNKFKFCVSCARLAEMRQKEIPRVLEQLEDLDSRVLYYSATKNGILYRVGDGVYLPPEAFTFNIKLSSPVKRPRKEPVDEDLYPEHYRKYSDYIKGSNLDAPEPYRIGRIKEIFCPKKSNGRPNETDIKIRVNKFYRPENTHKSTPASYHADINLLYWSDEEAVVDFKAVQGRCTVEYGEDLPECVQVYSMGGPNRFYFLEAYNAKSKSFEDPPNHARSPGNKGKGKGKGKGKPKSQACEPSEPEIEIKLPKLRTLDVFSGCGGLSEGFHQAGISDTLWAIEMWDPAAQAFRLNNPGSTVFTEDCNILLKLVMAGETTNSRGQRLPQKGDVEMLCGGPPCQGFSGMNRFNSRTYSKFKNSLVVSFLSYCDYYRPRFFLLENVRNFVSFKRSMVLKLTLRCLVRMGYQCTFGVLQAGQYGVAQTRRRAIILAAAPGEKLPLFPEPLHVFAPRACQLSVVVDDKKFVSNITRLSSGPFRTITVRDTMSDLPEVRNGASALEISYNGEPQSWFQRQLRGAQYQPILRDHICKDMSALVAARMRHIPLAPGSDWRDLPNIEVRLSDGTMARKLRYTHHDRKNGRSSSGALRGVCSCVEAGKACDPAARQFNTLIPWCLPHTGNRHNHWAGLYGRLEWDGFFSTTVTNPEPMGKQGRVLHPEQHRVVSVRECARSQGFPDTYRLFGNILDKHRQVGNAVPPPLAKAIGLEIKLCMLAKARESASAKIKEEEAAKDGGPSSGAPPPSGGSPAGSPTSTEEGTSESATPESGPGTSTEPSEGSAPGSPAGSPTSTEEGTSTEPSEGSAPGTSTEPSEPKKKRKVMDKKYSIGLAIGTNSVGWAVITDEYKVPSKKFKVLGNTDRHSIKKNLIGALLFDSGETAEATRLKRTARRRYTRRKNRICYLQEIFSNEMAKVDDSFFHRLEESFLVEEDKKHERHPIFGNIVDEVAYHEKYPTIYHLRKKLVDSTDKADLRLIYLALAHMIKFRGHFLIEGDLNPDNSDVDKLFIQLVQTYNQLFEENPINASGVDAKAILSARLSKSRRLENLIAQLPGEKKNGLFGNLIALSLGLTPNFKSNFDLAEDAKLQLSKDTYDDDLDNLLAQIGDQYADLFLAAKNLSDAILLSDILRVNTEITKAPLSASMIKRYDEHHQDLTLLKALVRQQLPEKYKEIFFDQSKNGYAGYIDGGASQEEFYKFIKPILEKMDGTEELLVKLNREDLLRKQRTFDNGSIPHQIHLGELHAILRRQEDFYPFLKDNREKIEKILTFRIPYYVGPLARGNSRFAWMTRKSEETITPWNFEEVVDKGASAQSFIERMTNFDKNLPNEKVLPKHSLLYEYFTVYNELTKVKYVTEGMRKPAFLSGEQKKAIVDLLFKTNRKVTVKQLKEDYFKKIECFDSVEISGVEDRFNASLGTYHDLLKIIKDKDFLDNEENEDILEDIVLTLTLFEDREMIEERLKTYAHLFDDKVMKQLKRRRYTGWGRLSRKLINGIRDKQSGKTILDFLKSDGFANRNFMQLIHDDSLTFKEDIQKAQVSGQGDSLHEHIANLAGSPAIKKGILQTVKVVDELVKVMGRHKPENIVIEMARENQTTQKGQKNSRERMKRIEEGIKELGSQILKEHPVENTQLQNEKLYLYYLQNGRDMYVDQELDINRLSDYDVDAIVPQSFLKDDSIDNKVLTRSDKNRGKSDNVPSEEVVKKMKNYWRQLLNAKLITQRKFDNLTKAERGGLSELDKAGFIKRQLVETRQITKHVAQILDSRMNTKYDENDKLIREVKVITLKSKLVSDFRKDFQFYKVREINNYHHAHDAYLNAVVGTALIKKYPKLESEFVYGDYKVYDVRKMIAKSEQEIGKATAKYFFYSNIMNFFKTEITLANGEIRKRPLIETNGETGEIVWDKGRDFATVRKVLSMPQVNIVKKTEVQTGGFSKESILPKRNSDKLIARKKDWDPKKYGGFDSPTVAYSVLVVAKVEKGKSKKLKSVKELLGITIMERSSFEKNPIDFLEAKGYKEVKKDLIIKLPKYSLFELENGRKRMLASAGELQKGNELALPSKYVNFLYLASHYEKLKGSPEDNEQKQLFVEQHKHYLDEIIEQISEFSKRVILADANLDKVLSAYNKHRDKPIREQAENIIHLFTLTNLGAPAAFKYFDTTIDRKRYTSTKEVLDATLIHQSITGLYETRIDLSQLGGDPKKKRKV

SEQ ID NO: 1113 - protein, 2374 aa, synthetic construct
  REGION 1..2374: note = Description of Artificial Sequence: Synthetic polypeptide
MPAMPSSGPGDTSSSAAEREEDRKDGEEQEEPRGKEERQEPSTTARKVGRPGRKRKHPPVESGDTPKDPAVISKSPSMAQDSGASELLPNGDLEKRSEPQPEEGSPAGGQKGGAPAEGEGAAETLPEASRAVENGCCTPKEGRGAPAEAGKEQKETNIESMKMEGSRGRLRGGLGWESSLRQRPMPRLTFQAGDPYYISKRKRDEWLARWKREAEKKAKVIAGMNAVEENQGPGESQKVEEASPPAVQQPTDPASPTVATTPEPVGSDAGDKNATKAGDDEPEYEDGRGFGIGELVWGKLRGFSWWPGRIVSWWMTGRSRAAEGTRWVMWFGDGKFSVVCVEKLMPLSSFCSAFHQATYNKQPMYRKAIYEVLQVASSRAGKLFPVCHDSDESDTAKAVEVQNKPMIEWALGGFQPSGPKGLEPPEEEKNPYKEVYTDMWVEPEAAAYAPPPPAKKPRKSTAEKPKVKEIIDERTRERLVYEVRQKCRNIEDICISCGSLNVTLEHPLFVGGMCQNCKNCFLECAYQYDDDGYQSYCTICCGGREVLMCGNNNCCRCFCVECVDLLVGPGAAQAAIKEDPWNCYMCGHKGTYGLLRRREDWPSRLQMFFANNHDQEFDPPKVYPPVPAEKRKPIRVLSLFDGIATGLLVLKDLGIQVDRYIASEVCEDSITVGMVRHQGKIMYVGDVRSVTQKHIQEWGPFDLVIGGSPCNDLSIVNPARKGLYEGTGRLFFEFYRLLHDARPKEGDDRPFFWLFENVVAMGVSDKRDISRFLESNPVMIDAKEVSAAHRARYFWGNLPGMNRPLASTVNDKLELQECLEHGRIAKFSKVRTITTRSNSIKQGKDQHFPVFMNEKEDILWCTEMERVFGFPVHYTDVSNMSRLARQRLLGRSWSVPVIRHLFAPLKEYFACVGGPSSGAPPPSGGSPAGSPTSTEEGTSESATPESGPGTSTEPSEGSAPGSPAGSPTSTEEGTSTEPSEGSAPGTSTEPSEPKKKRKVMDKKYSIGLAIGTNSVGWAVITDEYKVPSKKFKVLGNTDRHSIKKNLIGALLFDSGETAEATRLKRTARRRYTRRKNRICYLQEIFSNEMAKVDDSFFHRLEESFLVEEDKKHERHPIFGNIVDEVAYHEKYPTIYHLRKKLVDSTDKADLRLIYLALAHMIKFRGHFLIEGDLNPDNSDVDKLFIQLVQTYNQLFEENPINASGVDAKAILSARLSKSRRLENLIAQLPGEKKNGLFGNLIALSLGLTPNFKSNFDLAEDAKLQLSKDTYDDDLDNLLAQIGDQYADLFLAAKNLSDAILLSDILRVNTEITKAPLSASMIKRYDEHHQDLTLLKALVRQQLPEKYKEIFFDQSKNGYAGYIDGGASQEEFYKFIKPILEKMDGTEELLVKLNREDLLRKQRTFDNGSIPHQIHLGELHAILRRQEDFYPFLKDNREKIEKILTFRIPYYVGPLARGNSRFAWMTRKSEETITPWNFEEVVDKGASAQSFIERMTNFDKNLPNEKVLPKHSLLYEYFTVYNELTKVKYVTEGMRKPAFLSGEQKKAIVDLLFKTNRKVTVKQLKEDYFKKIECFDSVEISGVEDRFNASLGTYHDLLKIIKDKDFLDNEENEDILEDIVLTLTLFEDREMIEERLKTYAHLFDDKVMKQLKRRRYTGWGRLSRKLINGIRDKQSGKTILDFLKSDGFANRNFMQLIHDDSLTFKEDIQKAQVSGQGDSLHEHIANLAGSPAIKKGILQTVKVVDELVKVMGRHKPENIVIEMARENQTTQKGQKNSRERMKRIEEGIKELGSQILKEHPVENTQLQNEKLYLYYLQNGRDMYVDQELDINRLSDYDVDAIVPQSFLKDDSIDNKVLTRSDKNRGKSDNVPSEEVVKKMKNYWRQLLNAKLITQRKFDNLTKAERGGLSELDKAGFIKRQLVETRQITKHVAQILDSRMNTKYDENDKLIREVKVITLKSKLVSDFRKDFQFYKVREINNYHHAHDAYLNAVVGTALIKKYPKLESEFVYGDYKVYDVRKMIAKSEQEIGKATAKYFFYSNIMNFFKTEITLANGEIRKRPLIETNGETGEIVWDKGRDFATVRKVLSMPQVNIVKKTEVQTGGFSKESILPKRNSDKLIARKKDWDPKKYGGFDSPTVAYSVLVVAKVEKGKSKKLKSVKELLGITIMERSSFEKNPIDFLEAKGYKEVKKDLIIKLPKYSLFELENGRKRMLASAGELQKGNELALPSKYVNFLYLASHYEKLKGSPEDNEQKQLFVEQHKHYLDEIIEQISEFSKRVILADANLDKVLSAYNKHRDKPIREQAENIIHLFTLTNLGAPAAFKYFDTTIDRKRYTSTKEVLDATLIHQSITGLYETRIDLSQLGGDPKKKRKV

SEQ ID NO: 1114 - protein, 1764 aa, synthetic construct
  REGION 1..1764: note = Description of Artificial Sequence: Synthetic polypeptide
MNHDQEFDPPKVYPPVPAEKRKPIRVLSLFDGIATGLLVLKDLGIQVDRYIASEVCEDSITVGMVRHQGKIMYVGDVRSVTQKHIQEWGPFDLVIGGSPCNDLSIVNPARKGLYEGTGRLFFEFYRLLHDARPKEGDDRPFFWLFENVVAMGVSDKRDISRFLESNPVMIDAKEVSAAHRARYFWGNLPGMNRPLASTVNDKLELQECLEHGRIAKFSKVRTITTRSNSIKQGKDQHFPVFMNEKEDILWCTEMERVFGFPVHYTDVSNMSRLARQRLLGRSWSVPVIRHLFAPLKEYFACVGGPSSGAPPPSGGSPAGSPTSTEEGTSESATPESGPGTSTEPSEGSAPGSPAGSPTSTEEGTSTEPSEGSAPGTSTEPSEPKKKRKVMDKKYSIGLAIGTNSVGWAVITDEYKVPSKKFKVLGNTDRHSIKKNLIGALLFDSGETAEATRLKRTARRRYTRRKNRICYLQEIFSNEMAKVDDSFFHRLEESFLVEEDKKHERHPIFGNIVDEVAYHEKYPTIYHLRKKLVDSTDKADLRLIYLALAHMIKFRGHFLIEGDLNPDNSDVDKLFIQLVQTYNQLFEENPINASGVDAKAILSARLSKSRRLENLIAQLPGEKKNGLFGNLIALSLGLTPNFKSNFDLAEDAKLQLSKDTYDDDLDNLLAQIGDQYADLFLAAKNLSDAILLSDILRVNTEITKAPLSASMIKRYDEHHQDLTLLKALVRQQLPEKYKEIFFDQSKNGYAGYIDGGASQEEFYKFIKPILEKMDGTEELLVKLNREDLLRKQRTFDNGSIPHQIHLGELHAILRRQEDFYPFLKDNREKIEKILTFRIPYYVGPLARGNSRFAWMTRKSEETITPWNFEEVVDKGASAQSFIERMTNFDKNLPNEKVLPKHSLLYEYFTVYNELTKVKYVTEGMRKPAFLSGEQKKAIVDLLFKTNRKVTVKQLKEDYFKKIECFDSVEISGVEDRFNASLGTYHDLLKIIKDKDFLDNEENEDILEDIVLTLTLFEDREMIEERLKTYAHLFDDKVMKQLKRRRYTGWGRLSRKLINGIRDKQSGKTILDFLKSDGFANRNFMQLIHDDSLTFKEDIQKAQVSGQGDSLHEHIANLAGSPAIKKGILQTVKVVDELVKVMGRHKPENIVIEMARENQTTQKGQKNSRERMKRIEEGIKELGSQILKEHPVENTQLQNEKLYLYYLQNGRDMYVDQELDINRLSDYDVDAIVPQSFLKDDSIDNKVLTRSDKNRGKSDNVPSEEVVKKMKNYWRQLLNAKLITQRKFDNLTKAERGGLSELDKAGFIKRQLVETRQITKHVAQILDSRMNTKYDENDKLIREVKVITLKSKLVSDFRKDFQFYKVREINNYHHAHDAYLNAVVGTALIKKYPKLESEFVYGDYKVYDVRKMIAKSEQEIGKATAKYFFYSNIMNFFKTEITLANGEIRKRPLIETNGETGEIVWDKGRDFATVRKVLSMPQVNIVKKTEVQTGGFSKESILPKRNSDKLIARKKDWDPKKYGGFDSPTVAYSVLVVAKVEKGKSKKLKSVKELLGITIMERSSFEKNPIDFLEAKGYKEVKKDLIIKLPKYSLFELENGRKRMLASAGELQKGNELALPSKYVNFLYLASHYEKLKGSPEDNEQKQLFVEQHKHYLDEIIEQISEFSKRVILADANLDKVLSAYNKHRDKPIREQAENIIHLFTLTNLGAPAAFKYFDTTIDRKRYTSTKEVLDATLIHQSITGLYETRIDLSQLGGDPKKKRKV

SEQ ID NO: 1115 - protein, 2004 aa, synthetic construct
  REGION 1..2004: note = Description of Artificial Sequence: Synthetic polypeptide
MNHDQEFDPPKVYPPVPAEKRKPIRVLSLFDGIATGLLVLKDLGIQVDRYIASEVCEDSITVGMVRHQGKIMYVGDVRSVTQKHIQEWGPFDLVIGGSPCNDLSIVNPARKGLYEGTGRLFFEFYRLLHDARPKEGDDRPFFWLFENVVAMGVSDKRDISRFLESNPVMIDAKEVSAAHRARYFWGNLPGMNRPLASTVNDKLELQECLEHGRIAKFSKVRTITTRSNSIKQGKDQHFPVFMNEKEDILWCTEMERVFGFPVHYTDVSNMSRLARQRLLGRSWSVPVIRHLFAPLKEYFACVSSGNSNANSRGPSFSSGLVPLSLRGSHNPLEMFETVPVWRRQPVRVLSLFEDIKKELTSLGFLESGSDPGQLKHVVDVTDTVRKDVEEWGPFDLVYGATPPLGHTCDRPPSWYLFQFHRLLQYARPKPGSPRPFFWMFVDNLVLNKEDLDVASRFLEMEPVTIPDVHGGSLQNAVRVWSNIPAIRSRHWALVSEEELSLLAQNKQSSKLAAKWPTKLVKNCFLPLREYFKYFSTELTSSLGGPSSGAPPPSGGSPAGSPTSTEEGTSESATPESGPGTSTEPSEGSAPGSPAGSPTSTEEGTSTEPSEGSAPGTSTEPSEPKKKRKVMDKKYSIGLAIGTNSVGWAVITDEYKVPSKKFKVLGNTDRHSIKKNLIGALLFDSGETAEATRLKRTARRRYTRRKNRICYLQEIFSNEMAKVDDSFFHRLEESFLVEEDKKHERHPIFGNIVDEVAYHEKYPTIYHLRKKLVDSTDKADLRLIYLALAHMIKFRGHFLIEGDLNPDNSDVDKLFIQLVQTYNQLFEENPINASGVDAKAILSARLSKSRRLENLIAQLPGEKKNGLFGNLIALSLGLTPNFKSNFDLAEDAKLQLSKDTYDDDLDNLLAQIGDQYADLFLAAKNLSDAILLSDILRVNTEITKAPLSASMIKRYDEHHQDLTLLKALVRQQLPEKYKEIFFDQSKNGYAGYIDGGASQEEFYKFIKPILEKMDGTEELLVKLNREDLLRKQRTFDNGSIPHQIHLGELHAILRRQEDFYPFLKDNREKIEKILTFRIPYYVGPLARGNSRFAWMTRKSEETITPWNFEEVVDKGASAQSFIERMTNFDKNLPNEKVLPKHSLLYEYFTVYNELTKVKYVTEGMRKPAFLSGEQKKAIVDLLFKTNRKVTVKQLKEDYFKKIECFDSVEISGVEDRFNASLGTYHDLLKIIKDKDFLDNEENEDILEDIVLTLTLFEDREMIEERLKTYAHLFDDKVMKQLKRRRYTGWGRLSRKLINGIRDKQSGKTILDFLKSDGFANRNFMQLIHDDSLTFKEDIQKAQVSGQGDSLHEHIANLAGSPAIKKGILQTVKVVDELVKVMGRHKPENIVIEMARENQTTQKGQKNSRERMKRIEEGIKELGSQILKEHPVENTQLQNEKLYLYYLQNGRDMYVDQELDINRLSDYDVDAIVPQSFLKDDSIDNKVLTRSDKNRGKSDNVPSEEVVKKMKNYWRQLLNAKLITQRKFDNLTKAERGGLSELDKAGFIKRQLVETRQITKHVAQILDSRMNTKYDENDKLIREVKVITLKSKLVSDFRKDFQFYKVREINNYHHAHDAYLNAVVGTALIKKYPKLESEFVYGDYKVYDVRKMIAKSEQEIGKATAKYFFYSNIMNFFKTEITLANGEIRKRPLIETNGETGEIVWDKGRDFATVRKVLSMPQVNIVKKTEVQTGGFSKESILPKRNSDKLIARKKDWDPKKYGGFDSPTVAYSVLVVAKVEKGKSKKLKSVKELLGITIMERSSFEKNPIDFLEAKGYKEVKKDLIIKLPKYSLFELENGRKRMLASAGELQKGNELALPSKYVNFLYLASHYEKLKGSPEDNEQKQLFVEQHKHYLDEIIEQISEFSKRVILADANLDKVLSAYNKHRDKPIREQAENIIHLFTLTNLGAPAAFKYFDTTIDRKRYTSTKEVLDATLIHQSITGLYETRIDLSQLGGDPKKKRKV

SEQ ID NO: 1116 - protein, 2315 aa, synthetic construct
  REGION 1..2315: note = Description of Artificial Sequence: Synthetic polypeptide
MKGDTRHLNGEEDAGGREDSILVNGACSDQSSDSPPILEAIRTPEIRGRRSSSRLSKREVSSLLSYTQDLTGDGDGEDGDGSDTPVMPKLFRETRTRSESPAVRTRNNNSVSSRERHRPSPRSTRGRQGRNHVDESPVEFPATRSLRRRATASAGTPWPSPPSSYLTIDLTDDTEDTHGTPQSSSTPYARLAQDSQQGGMESPQVEADSGDGDSSEYQDGKEFGIGDLVWGKIKGFSWWPAMVVSWKATSKRQAMSGMRWVQWFGDGKFSEVSADKLVALGLFSQHFNLATFNKLVSYRKAMYHALEKARVRAGKTFPSSPGDSLEDQLKPMLEWAHGGFKPTGIEGLKPNNTQPVVNKSKVRRAGSRKLESRKYENKTRRRTADDSATSDYCPAPKRLKTNCYNNGKDRGDEDQSREQMASDVANNKSSLEDGCLSCGRKNPVSFHPLFEGGLCQTCRDRFLELFYMYDDDGYQSYCTVCCEGRELLLCSNTSCCRCFCVECLEVLVGTGTAAEAKLQEPWSCYMCLPQRCHGVLRRRKDWNVRLQAFFTSDTGLEYEAPKLYPAIPAARRRPIRVLSLFDGIATGYLVLKELGIKVGKYVASEVCEESIAVGTVKHEGNIKYVNDVRNITKKNIEEWGPFDLVIGGSPCNDLSNVNPARKGLYEGTGRLFFEFYHLLNYSRPKEGDDRPFFWMFENVVAMKVGDKRDISRFLECNPVMIDAIKVSAAHRARYFWGNLPGMNRPVIASKNDKLELQDCLEYNRIAKLKKVQTITTKSNSIKQGKNQLFPVVMNGKEDVLWCTELERIFGFPVHYTDVSNMGRGARQKLLGRSWSVPVIRHLFAPLKDYFACEGGPSSGAPPPSGGSPAGSPTSTEEGTSESATPESGPGTSTEPSEGSAPGSPAGSPTSTEEGTSTEPSEGSAPGTSTEPSEPKKKRKVMDKKYSIGLAIGTNSVGWAVITDEYKVPSKKFKVLGNTDRHSIKKNLIGALLFDSGETAEATRLKRTARRRYTRRKNRICYLQEIFSNEMAKVDDSFFHRLEESFLVEEDKKHERHPIFGNIVDEVAYHEKYPTIYHLRKKLVDSTDKADLRLIYLALAHMIKFRGHFLIEGDLNPDNSDVDKLFIQLVQTYNQLFEENPINASGVDAKAILSARLSKSRRLENLIAQLPGEKKNGLFGNLIALSLGLTPNFKSNFDLAEDAKLQLSKDTYDDDLDNLLAQIGDQYADLFLAAKNLSDAILLSDILRVNTEITKAPLSASMIKRYDEHHQDLTLLKALVRQQLPEKYKEIFFDQSKNGYAGYIDGGASQEEFYKFIKPILEKMDGTEELLVKLNREDLLRKQRTFDNGSIPHQIHLGELHAILRRQEDFYPFLKDNREKIEKILTFRIPYYVGPLARGNSRFAWMTRKSEETITPWNFEEVVDKGASAQSFIERMTNFDKNLPNEKVLPKHSLLYEYFTVYNELTKVKYVTEGMRKPAFLSGEQKKAIVDLLFKTNRKVTVKQLKEDYFKKIECFDSVEISGVEDRFNASLGTYHDLLKIIKDKDFLDNEENEDILEDIVLTLTLFEDREMIEERLKTYAHLFDDKVMKQLKRRRYTGWGRLSRKLINGIRDKQSGKTILDFLKSDGFANRNFMQLIHDDSLTFKEDIQKAQVSGQGDSLHEHIANLAGSPAIKKGILQTVKVVDELVKVMGRHKPENIVIEMARENQTTQKGQKNSRERMKRIEEGIKELGSQILKEHPVENTQLQNEKLYLYYLQNGRDMYVDQELDINRLSDYDVDAIVPQSFLKDDSIDNKVLTRSDKNRGKSDNVPSEEVVKKMKNYWRQLLNAKLITQRKFDNLTKAERGGLSELDKAGFIKRQLVETRQITKHVAQILDSRMNTKYDENDKLIREVKVITLKSKLVSDFRKDFQFYKVREINNYHHAHDAYLNAVVGTALIKKYPKLESEFVYGDYKVYDVRKMIAKSEQEIGKATAKYFFYSNIMNFFKTEITLANGEIRKRPLIETNGETGEIVWDKGRDFATVRKVLSMPQVNIVKKTEVQTGGFSKESILPKRNSDKLIARKKDWDPKKYGGFDSPTVAYSVLVVAKVEKGKSKKLKSVKELLGITIMERSSFEKNPIDFLEAKGYKEVKKDLIIKLPKYSLFELENGRKRMLASAGELQKGNELALPSKYVNFLYLASHYEKLKGSPEDNEQKQLFVEQHKHYLDEIIEQISEFSKRVILADANLDKVLSAYNKHRDKPIREQAENIIHLFTLTNLGAPAAFKYFDTTIDRKRYTSTKEVLDATLIHQSITGLYETRIDLSQLGGDPKKKRKV

SEQ ID NO: 1117 - protein, 1742 aa, synthetic construct
  REGION 1..1742: note = Description of Artificial Sequence: Synthetic polypeptide
MIRVLSLFDGIATGYLVLKELGIKVGKYVASEVCEESIAVGTVKHEGNIKYVNDVRNITKKNIEEWGPFDLVIGGSPCNDLSNVNPARKGLYEGTGRLFFEFYHLLNYSRPKEGDDRPFFWMFENVVAMKVGDKRDISRFLECNPVMIDAIKVSAAHRARYFWGNLPGMNRPVIASKNDKLELQDCLEYNRIAKLKKVQTITTKSNSIKQGKNQLFPVVMNGKEDVLWCTELERIFGFPVHYTDVSNMGRGARQKLLGRSWSVPVIRHLFAPLKDYFACEGGPSSGAPPPSGGSPAGSPTSTEEGTSESATPESGPGTSTEPSEGSAPGSPAGSPTSTEEGTSTEPSEGSAPGTSTEPSEPKKKRKVMDKKYSIGLAIGTNSVGWAVITDEYKVPSKKFKVLGNTDRHSIKKNLIGALLFDSGETAEATRLKRTARRRYTRRKNRICYLQEIFSNEMAKVDDSFFHRLEESFLVEEDKKHERHPIFGNIVDEVAYHEKYPTIYHLRKKLVDSTDKADLRLIYLALAHMIKFRGHFLIEGDLNPDNSDVDKLFIQLVQTYNQLFEENPINASGVDAKAILSARLSKSRRLENLIAQLPGEKKNGLFGNLIALSLGLTPNFKSNFDLAEDAKLQLSKDTYDDDLDNLLAQIGDQYADLFLAAKNLSDAILLSDILRVNTEITKAPLSASMIKRYDEHHQDLTLLKALVRQQLPEKYKEIFFDQSKNGYAGYIDGGASQEEFYKFIKPILEKMDGTEELLVKLNREDLLRKQRTFDNGSIPHQIHLGELHAILRRQEDFYPFLKDNREKIEKILTFRIPYYVGPLARGNSRFAWMTRKSEETITPWNFEEVVDKGASAQSFIERMTNFDKNLPNEKVLPKHSLLYEYFTVYNELTKVKYVTEGMRKPAFLSGEQKKAIVDLLFKTNRKVTVKQLKEDYFKKIECFDSVEISGVEDRFNASLGTYHDLLKIIKDKDFLDNEENEDILEDIVLTLTLFEDREMIEERLKTYAHLFDDKVMKQLKRRRYTGWGRLSRKLINGIRDKQSGKTILDFLKSDGFANRNFMQLIHDDSLTFKEDIQKAQVSGQGDSLHEHIANLAGSPAIKKGILQTVKVVDELVKVMGRHKPENIVIEMARENQTTQKGQKNSRERMKRIEEGIKELGSQILKEHPVENTQLQNEKLYLYYLQNGRDMYVDQELDINRLSDYDVDAIVPQSFLKDDSIDNKVLTRSDKNRGKSDNVPSEEVVKKMKNYWRQLLNAKLITQRKFDNLTKAERGGLSELDKAGFIKRQLVETRQITKHVAQILDSRMNTKYDENDKLIREVKVITLKSKLVSDFRKDFQFYKVREINNYHHAHDAYLNAVVGTALIKKYPKLESEFVYGDYKVYDVRKMIAKSEQEIGKATAKYFFYSNIMNFFKTEITLANGEIRKRPLIETNGETGEIVWDKGRDFATVRKVLSMPQVNIVKKTEVQTGGFSKESILPKRNSDKLIARKKDWDPKKYGGFDSPTVAYSVLVVAKVEKGKSKKLKSVKELLGITIMERSSFEKNPIDFLEAKGYKEVKKDLIIKLPKYSLFELENGRKRMLASAGELQKGNELALPSKYVNFLYLASHYEKLKGSPEDNEQKQLFVEQHKHYLDEIIEQISEFSKRVILADANLDKVLSAYNKHRDKPIREQAENIIHLFTLTNLGAPAAFKYFDTTIDRKRYTSTKEVLDATLIHQSITGLYETRIDLSQLGGDPKKKRKV

SEQ ID NO: 1118 - protein, 1984 aa, synthetic construct
  REGION 1..1984: note = Description of Artificial Sequence: Synthetic polypeptide
MIRVLSLFDGIATGYLVLKELGIKVGKYVASEVCEESIAVGTVKHEGNIKYVNDVRNITKKNIEEWGPFDLVIGGSPCNDLSNVNPARKGLYEGTGRLFFEFYHLLNYSRPKEGDDRPFFWMFENVVAMKVGDKRDISRFLECNPVMIDAIKVSAAHRARYFWGNLPGMNRPVIASKNDKLELQDCLEYNRIAKLKKVQTITTKSNSIKQGKNQLFPVVMNGKEDVLWCTELERIFGFPVHYTDVSNMGRGARQKLLGRSWSVPVIRHLFAPLKDYFACESSGNSNANSRGPSFSSGLVPLSLRGSHMGPMEIYKTVSAWKRQPVRVLSLFRNIDKVLKSLGFLESGSGSGGGTLKYVEDVTNVVRRDVEKWGPFDLVYGSTQPLGSSCDRCPGWYMFQFHRILQYALPRQESQRPFFWIFMDNLLLTEDDQETTTRFLQTEAVTLQDVRGRDYQNAMRVWSNIPGLKSKHAPLTPKEEEYLQAQVRSRSKLDAPKVDLLVKNCLLPLREYFKYFSQNSLPLGGPSSGAPPPSGGSPAGSPTSTEEGTSESATPESGPGTSTEPSEGSAPGSPAGSPTSTEEGTSTEPSEGSAPGTSTEPSEPKKKRKVMDKKYSIGLAIGTNSVGWAVITDEYKVPSKKFKVLGNTDRHSIKKNLIGALLFDSGETAEATRLKRTARRRYTRRKNRICYLQEIFSNEMAKVDDSFFHRLEESFLVEEDKKHERHPIFGNIVDEVAYHEKYPTIYHLRKKLVDSTDKADLRLIYLALAHMIKFRGHFLIEGDLNPDNSDVDKLFIQLVQTYNQLFEENPINASGVDAKAILSARLSKSRRLENLIAQLPGEKKNGLFGNLIALSLGLTPNFKSNFDLAEDAKLQLSKDTYDDDLDNLLAQIGDQYADLFLAAKNLSDAILLSDILRVNTEITKAPLSASMIKRYDEHHQDLTLLKALVRQQLPEKYKEIFFDQSKNGYAGYIDGGASQEEFYKFIKPILEKMDGTEELLVKLNREDLLRKQRTFDNGSIPHQIHLGELHAILRRQEDFYPFLKDNREKIEKILTFRIPYYVGPLARGNSRFAWMTRKSEETITPWNFEEVVDKGASAQSFIERMTNFDKNLPNEKVLPKHSLLYEYFTVYNELTKVKYVTEGMRKPAFLSGEQKKAIVDLLFKTNRKVTVKQLKEDYFKKIECFDSVEISGVEDRFNASLGTYHDLLKIIKDKDFLDNEENEDILEDIVLTLTLFEDREMIEERLKTYAHLFDDKVMKQLKRRRYTGWGRLSRKLINGIRDKQSGKTILDFLKSDGFANRNFMQLIHDDSLTFKEDIQKAQVSGQGDSLHEHIANLAGSPAIKKGILQTVKVVDELVKVMGRHKPENIVIEMARENQTTQKGQKNSRERMKRIEEGIKELGSQILKEHPVENTQLQNEKLYLYYLQNGRDMYVDQELDINRLSDYDVDAIVPQSFLKDDSIDNKVLTRSDKNRGKSDNVPSEEVVKKMKNYWRQLLNAKLITQRKFDNLTKAERGGLSELDKAGFIKRQLVETRQITKHVAQILDSRMNTKYDENDKLIREVKVITLKSKLVSDFRKDFQFYKVREINNYHHAHDAYLNAVVGTALIKKYPKLESEFVYGDYKVYDVRKMIAKSEQEIGKATAKYFFYSNIMNFFKTEITLANGEIRKRPLIETNGETGEIVWDKGRDFATVRKVLSMPQVNIVKKTEVQTGGFSKESILPKRNSDKLIARKKDWDPKKYGGFDSPTVAYSVLVVAKVEKGKSKKLKSVKELLGITIMERSSFEKNPIDFLEAKGYKEVKKDLIIKLPKYSLFELENGRKRMLASAGELQKGNELALPSKYVNFLYLASHYEKLKGSPEDNEQKQLFVEQHKHYLDEIIEQISEFSKRVILADANLDKVLSAYNKHRDKPIREQAENIIHLFTLTNLGAPAAFKYFDTTIDRKRYTSTKEVLDATLIHQSITGLYETRIDLSQLGGDPKKKRKV

SEQ ID NO: 1119 - protein, 1849 aa, synthetic construct
  REGION 1..1849: note = Description of Artificial Sequence: Synthetic polypeptide
MAAIPALDPEAEPSMDVILVGSSELSSSVSPGTGRDLIAYEVKANQRNIEDICICCGSLQVHTQHPLFEGGICAPCKDKFLDALFLYDDDGYQSYCSICCSGETLLICGNPDCTRCYCFECVDSLVGPGTSGKVHAMSNWVCYLCLPSSRSGLLQRRRKWRSQLKAFYDRESENPLEMFETVPVWRRQPVRVLSLFEDIKKELTSLGFLESGSDPGQLKHVVDVTDTVRKDVEEWGPFDLVYGATPPLGHTCDRPPSWYLFQFHRLLQYARPKPGSPRPFFWMFVDNLVLNKEDLDVASRFLEMEPVTIPDVHGGSLQNAVRVWSNIPAIRSSRHWALVSEEELSLLAQNKQSSKLAAKWPTKLVKNCFLPLREYFKYFSTELTSSLGGPSSGAPPPSGGSPAGSPTSTEEGTSESATPESGPGTSTEPSEGSAPGSPAGSPTSTEEGTSTEPSEGSAPGTSTEPSEPKKKRKVMDKKYSIGLAIGTNSVGWAVITDEYKVPSKKFKVLGNTDRHSIKKNLIGALLFDSGETAEATRLKRTARRRYTRRKNRICYLQEIFSNEMAKVDDSFFHRLEESFLVEEDKKHERHPIFGNIVDEVAYHEKYPTIYHLRKKLVDSTDKADLRLIYLALAHMIKFRGHFLIEGDLNPDNSDVDKLFIQLVQTYNQLFEENPINASGVDAKAILSARLSKSRRLENLIAQLPGEKKNGLFGNLIALSLGLTPNFKSNFDLAEDAKLQLSKDTYDDDLDNLLAQIGDQYADLFLAAKNLSDAILLSDILRVNTEITKAPLSASMIKRYDEHHQDLTLLKALVRQQLPEKYKEIFFDQSKNGYAGYIDGGASQEEFYKFIKPILEKMDGTEELLVKLNREDLLRKQRTFDNGSIPHQIHLGELHAILRRQEDFYPFLKDNREKIEKILTFRIPYYVGPLARGNSRFAWMTRKSEETITPWNFEEVVDKGASAQSFIERMTNFDKNLPNEKVLPKHSLLYEYFTVYNELTKVKYVTEGMRKPAFLSGEQKKAIVDLLFKTNRKVTVKQLKEDYFKKIECFDSVEISGVEDRFNASLGTYHDLLKIIKDKDFLDNEENEDILEDIVLTLTLFEDREMIEERLKTYAHLFDDKVMKQLKRRRYTGWGRLSRKLINGIRDKQSGKTILDFLKSDGFANRNFMQLIHDDSLTFKEDIQKAQVSGQGDSLHEHIANLAGSPAIKKGILQTVKVVDELVKVMGRHKPENIVIEMARENQTTQKGQKNSRERMKRIEEGIKELGSQILKEHPVENTQLQNEKLYLYYLQNGRDMYVDQELDINRLSDYDVDAIVPQSFLKDDSIDNKVLTRSDKNRGKSDNVPSEEVVKKMKNYWRQLLNAKLITQRKFDNLTKAERGGLSELDKAGFIKRQLVETRQITKHVAQILDSRMNTKYDENDKLIREVKVITLKSKLVSDFRKDFQFYKVREINNYHHAHDAYLNAVVGTALIKKYPKLESEFVYGDYKVYDVRKMIAKSEQEIGKATAKYFFYSNIMNFFKTEITLANGEIRKRPLIETNGETGEIVWDKGRDFATVRKVLSMPQVNIVKKTEVQTGGFSKESILPKRNSDKLIARKKDWDPKKYGGFDSPTVAYSVLVVAKVEKGKSKKLKSVKELLGITIMERSSFEKNPIDFLEAKGYKEVKKDLIIKLPKYSLFELENGRKRMLASAGELQKGNELALPSKYVNFLYLASHYEKLKGSPEDNEQKQLFVEQHKHYLDEIIEQISEFSKRVILADANLDKVLSAYNKHRDKPIREQAENIIHLFTLTNLGAPAAFKYFDTTIDRKRYTSTKEVLDATLIHQSITGLYETRIDLSQLGGDPKKKRKV

SEQ ID NO: 1120 - protein, 1883 aa, synthetic construct
  REGION 1..1883: note = Description of Artificial Sequence: Synthetic polypeptide
MGSRETPSSCSKTLETLDLETSDSSSPDADSPLEEQWLKSSPALKEDSVDVVLEDCKEPLSPSSPPTGREMIRYEVKVNRRSIEDICLCCGTLQVYTRHPLFEGGLCAPCKDKFLESLFLYDDDGHQSYCTICCSGGTLFICESPDCTRCYCFECVDILVGPGTSERINAMACWVCFLCLPFSRSGLLQRRKRWRHQLKAFHDQEGAGPMEIYKTVSAWKRQPVRVLSLFRNIDKVLKSLGFLESGSGSGGGTLKYVEDVTNVVRRDVEKWGPFDLVYGSTQPLGSSCDRCPGWYMFQFHRILQYALPRQESQRPFFWIFMDNLLLTEDDQETTTRFLQTEAVTLQDVRGRDYQNAMRVWSNIPGLKSKHAPLTPKEEEYLQAQVRSRSKLDAPKVDLLVKNCLLPLREYFKYFSQNSLPLGGPSSGAPPPSGGSPAGSPTSTEEGTSESATPESGPGTSTEPSEGSAPGSPAGSPTSTEEGTSTEPSEGSAPGTSTEPSEPKKKRKVMDKKYSIGLAIGTNSVGWAVITDEYKVPSKKFKVLGNTDRHSIKKNLIGALLFDSGETAEATRLKRTARRRYTRRKNRICYLQEIFSNEMAKVDDSFFHRLEESFLVEEDKKHERHPIFGNIVDEVAYHEKYPTIYHLRKKLVDSTDKADLRLIYLALAHMIKFRGHFLIEGDLNPDNSDVDKLFIQLVQTYNQLFEENPINASGVDAKAILSARLSKSRRLENLIAQLPGEKKNGLFGNLIALSLGLTPNFKSNFDLAEDAKLQLSKDTYDDDLDNLLAQIGDQYADLFLAAKNLSDAILLSDILRVNTEITKAPLSASMIKRYDEHHQDLTLLKALVRQQLPEKYKEIFFDQSKNGYAGYIDGGASQEEFYKFIKPILEKMDGTEELLVKLNREDLLRKQRTFDNGSIPHQIHLGELHAILRRQEDFYPFLKDNREKIEKILTFRIPYYVGPLARGNSRFAWMTRKSEETITPWNFEEVVDKGASAQSFIERMTNFDKNLPNEKVLPKHSLLYEYFTVYNELTKVKYVTEGMRKPAFLSGEQKKAIVDLLFKTNRKVTVKQLKEDYFKKIECFDSVEISGVEDRFNASLGTYHDLLKIIKDKDFLDNEENEDILEDIVLTLTLFEDREMIEERLKTYAHLFDDKVMKQLKRRRYTGWGRLSRKLINGIRDKQSGKTILDFLKSDGFANRNFMQLIHDDSLTFKEDIQKAQVSGQGDSLHEHIANLAGSPAIKKGILQTVKVVDELVKVMGRHKPENIVIEMARENQTTQKGQKNSRERMKRIEEGIKELGSQILKEHPVENTQLQNEKLYLYYLQNGRDMYVDQELDINRLSDYDVDAIVPQSFLKDDSIDNKVLTRSDKNRGKSDNVPSEEVVKKMKNYWRQLLNAKLITQRKFDNLTKAERGGLSELDKAGFIKRQLVETRQITKHVAQILDSRMNTKYDENDKLIREVKVITLKSKLVSDFRKDFQFYKVREINNYHHAHDAYLNAVVGTALIKKYPKLESEFVYGDYKVYDVRKMIAKSEQEIGKATAKYFFYSNIMNFFKTEITLANGEIRKRPLIETNGETGEIVWDKGRDFATVRKVLSMPQVNIVKKTEVQTGGFSKESILPKRNSDKLIARKKDWDPKKYGGFDSPTVAYSVLVVAKVEKGKSKKLKSVKELLGITIMERSSFEKNPIDFLEAKGYKEVKKDLIIKLPKYSLFELENGRKRMLASAGELQKGNELALPSKYVNFLYLASHYEKLKGSPEDNEQKQLFVEQHKHYLDEIIEQISEFSKRVILADANLDKVLSAYNKHRDKPIREQAENIIHLFTLTNLGAPAAFKYFDTTIDRKRYTSTKEVLDATLIHQSITGLYETRIDLSQLGGDPKKKRKV

SEQ ID NO: 1121 - protein, 2202 aa, synthetic construct
  REGION 1..2202: note = Description of Artificial Sequence: Synthetic polypeptide
MRGGSRHLSNEEDVSGCEDCIIISGTCSDQSSDPKTVPLTQVLEAVCTVENRGCRTSSQPSKRKASSLISYVQDLTGDGDEDRDGEVGGSSGSGTPVMPQLFCETRIPSKTPAPLSWQANTSASTPWLSPASPYPIIDLTDEDVIPQSISTPSVDWSQDSHQEGMDTTQVDAESRDGGNIEYQVSADKLLLSQSCILAAFYKLVPYRESIYRTLEKARVRAGKACPSSPGESLEDQLKPMLEWAHGGFKPTGIEGLKPNKKQPENKSRRRTTNDPAASESSPPKRLKTNSYGGKDRGEDEESREQMASDVTNNKGNLEDHCLSCGRKDPVSFHPLFEGGLCQSCRDRFLELFYMYDEDGYQSYCTVCCEGRELLLCSNTSCCRCFCVECLEVLVGAGTAEDVKLQEPWSCYMCLPQRCHGVLRRRKDWNMRLQDFFTTDPDLEEFEPPKLYPAIPAAKRRPIRVLSLFDGIATGYLVLKELGIKVEKYIASEVCAESIAVGTVKHEGQIKYVDDIRNITKEHIDEWGPFDLVIGGSPCNDLSCVNPVRKGLFEGTGRLFFEFYRLLNYSCPEEEDDRPFFWMFENVVAMEVGDKRDISRFLECNPVMIDAIKVSAAHRARYFWGNLPGMNRPVMASKNDKLELQDCLEFSRTAKLKKVQTITTKSNSIRQGKNQLFPVVMNGKDDVLWCTELERIFGFPEHYTDVSNMGRGARQKLLGRSWSVPVIRHLFAPLKDHFACEGGPSSGAPPPSGGSPAGSPTSTEEGTSESATPESGPGTSTEPSEGSAPGSPAGSPTSTEEGTSTEPSEGSAPGTSTEPSEPKKKRKVMDKKYSIGLAIGTNSVGWAVITDEYKVPSKKFKVLGNTDRHSIKKNLIGALLFDSGETAEATRLKRTARRRYTRRKNRICYLQEIFSNEMAKVDDSFFHRLEESFLVEEDKKHERHPIFGNIVDEVAYHEKYPTIYHLRKKLVDSTDKADLRLIYLALAHMIKFRGHFLIEGDLNPDNSDVDKLFIQLVQTYNQLFEENPINASGVDAKAILSARLSKSRRLENLIAQLPGEKKNGLFGNLIALSLGLTPNFKSNFDLAEDAKLQLSKDTYDDDLDNLLAQIGDQYADLFLAAKNLSDAILLSDILRVNTEITKAPLSASMIKRYDEHHQDLTLLKALVRQQLPEKYKEIFFDQSKNGYAGYIDGGASQEEFYKFIKPILEKMDGTEELLVKLNREDLLRKQRTFDNGSIPHQIHLGELHAILRRQEDFYPFLKDNREKIEKILTFRIPYYVGPLARGNSRFAWMTRKSEETITPWNFEEVVDKGASAQSFIERMTNFDKNLPNEKVLPKHSLLYEYFTVYNELTKVKYVTEGMRKPAFLSGEQKKAIVDLLFKTNRKVTVKQLKEDYFKKIECFDSVEISGVEDRFNASLGTYHDLLKIIKDKDFLDNEENEDILEDIVLTLTLFEDREMIEERLKTYAHLFDDKVMKQLKRRRYTGWGRLSRKLINGIRDKQSGKTILDFLKSDGFANRNFMQLIHDDSLTFKEDIQKAQVSGQGDSLHEHIANLAGSPAIKKGILQTVKVVDELVKVMGRHKPENIVIEMARENQTTQKGQKNSRERMKRIEEGIKELGSQILKEHPVENTQLQNEKLYLYYLQNGRDMYVDQELDINRLSDYDVDAIVPQSFLKDDSIDNKVLTRSDKNRGKSDNVPSEEVVKKMKNYWRQLLNAKLITQRKFDNLTKAERGGLSELDKAGFIKRQLVETRQITKHVAQILDSRMNTKYDENDKLIREVKVITLKSKLVSDFRKDFQFYKVREINNYHHAHDAYLNAVVGTALIKKYPKLESEFVYGDYKVYDVRKMIAKSEQEIGKATAKYFFYSNIMNFFKTEITLANGEIRKRPLIETNGETGEIVWDKGRDFATVRKVLSMPQVNIVKKTEVQTGGFSKESILPKRNSDKLIARKKDWDPKKYGGFDSPTVAYSVLVVAKVEKGKSKKLKSVKELLGITIMERSSFEKNPIDFLEAKGYKEVKKDLIIKLPKYSLFELENGRKRMLASAGELQKGNELALPSKYVNFLYLASHYEKLKGSPEDNEQKQLFVEQHKHYLDEIIEQISEFSKRVILADANLDKVLSAYNKHRDKPIREQAENIIHLFTLTNLGAPAAFKYFDTTIDRKRYTSTKEVLDATLIHQSITGLYETRIDLSQLGGDPKKKRKV

SEQ ID NO: 1122 - protein, 1742 aa, synthetic construct
  REGION 1..1742: note = Description of Artificial Sequence: Synthetic polypeptide
MIRVLSLFDGIATGYLVLKELGIKVEKYIASEVCAESIAVGTVKHEGQIKYVDDIRNITKEHIDEWGPFDLVIGGSPCNDLSCVNPVRKGLFEGTGRLFFEFYRLLNYSCPEEEDDRPFFWMFENVVAMEVGDKRDISRFLECNPVMIDAIKVSAAHRARYFWGNLPGMNRPVMASKNDKLELQDCLEFSRTAKLKKVQTITTKSNSIRQGKNQLFPVVMNGKDDVLWCTELERIFGFPEHYTDVSNMGRGARQKLLGRSWSVPVIRHLFAPLKDHFACEGGPSSGAPPPSGGSPAGSPTSTEEGTSESATPESGPGTSTEPSEGSAPGSPAGSPTSTEEGTSTEPSEGSAPGTSTEPSEPKKKRKVMDKKYSIGLAIGTNSVGWAVITDEYKVPSKKFKVLGNTDRHSIKKNLIGALLFDSGETAEATRLKRTARRRYTRRKNRICYLQEIFSNEMAKVDDSFFHRLEESFLVEEDKKHERHPIFGNIVDEVAYHEKYPTIYHLRKKLVDSTDKADLRLIYLALAHMIKFRGHFLIEGDLNPDNSDVDKLFIQLVQTYNQLFEENPINASGVDAKAILSARLSKSRRLENLIAQLPGEKKNGLFGNLIALSLGLTPNFKSNFDLAEDAKLQLSKDTYDDDLDNLLAQIGDQYADLFLAAKNLSDAILLSDILRVNTEITKAPLSASMIKRYDEHHQDLTLLKALVRQQLPEKYKEIFFDQSKNGYAGYIDGGASQEEFYKFIKPILEKMDGTEELLVKLNREDLLRKQRTFDNGSIPHQIHLGELHAILRRQEDFYPFLKDNREKIEKILTFRIPYYVGPLARGNSRFAWMTRKSEETITPWNFEEVVDKGASAQSFIERMTNFDKNLPNEKVLPKHSLLYEYFTVYNELTKVKYVTEGMRKPAFLSGEQKKAIVDLLFKTNRKVTVKQLKEDYFKKIECFDSVEISGVEDRFNASLGTYHDLLKIIKDKDFLDNEENEDILEDIVLTLTLFEDREMIEERLKTYAHLFDDKVMKQLKRRRYTGWGRLSRKLINGIRDKQSGKTILDFLKSDGFANRNFMQLIHDDSLTFKEDIQKAQVSGQGDSLHEHIANLAGSPAIKKGILQTVKVVDELVKVMGRHKPENIVIEMARENQTTQKGQKNSRERMKRIEEGIKELGSQILKEHPVENTQLQNEKLYLYYLQNGRDMYVDQELDINRLSDYDVDAIVPQSFLKDDSIDNKVLTRSDKNRGKSDNVPSEEVVKKMKNYWRQLLNAKLITQRKFDNLTKAERGGLSELDKAGFIKRQLVETRQITKHVAQILDSRMNTKYDENDKLIREVKVITLKSKLVSDFRKDFQFYKVREINNYHHAHDAYLNAVVGTALIKKYPKLESEFVYGDYKVYDVRKMIAKSEQEIGKATAKYFFYSNIMNFFKTEITLANGEIRKRPLIETNGETGEIVWDKGRDFATVRKVLSMPQVNIVKKTEVQTGGFSKESILPKRNSDKLIARKKDWDPKKYGGFDSPTVAYSVLVVAKVEKGKSKKLKSVKELLGITIMERSSFEKNPIDFLEAKGYKEVKKDLIIKLPKYSLFELENGRKRMLASAGELQKGNELALPSKYVNFLYLASHYEKLKGSPEDNEQKQLFVEQHKHYLDEIIEQISEFSKRVILADANLDKVLSAYNKHRDKPIREQAENIIHLFTLTNLGAPAAFKYFDTTIDRKRYTSTKEVLDATLIHQSITGLYETRIDLSQLGGDPKKKRKV

SEQ ID NO: 1123 - protein, 1984 aa, synthetic construct
  REGION 1..1984: note = Description of Artificial Sequence: Synthetic polypeptide
MIRVLSLFDGIATGYLVLKELGIKVEKYIASEVCAESIAVGTVKHEGQIKYVDDIRNITKEHIDEWGPFDLVIGGSPCNDLSCVNPVRKGLFEGTGRLFFEFYRLLNYSCPEEEDDRPFFWMFENVVAMEVGDKRDISRFLECNPVMIDAIKVSAAHRARYFWGNLPGMNRPVMASKNDKLELQDCLEFSRTAKLKKVQTITTKSNSIRQGKNQLFPVVMNGKDDVLWCTELERIFGFPEHYTDVSNMGRGARQKLLGRSWSVPVIRHLFAPLKDHFACESSGNSNANSRGPSFSSGLVPLSLRGSHMGPMEIYKTVSAWKRQPVRVLSLFRNIDKVLKSLGFLESGSGSGGGTLKYVEDVTNVVRRDVEKWGPFDLVYGSTQPLGSSCDRCPGWYMFQFHRILQYALPRQESQRPFFWIFMDNLLLTEDDQETTTRFLQTEAVTLQDVRGRDYQNAMRVWSNIPGLKSKHAPLTPKEEEYLQAQVRSRSKLDAPKVDLLVKNCLLPLREYFKYFSQNSLPLGGPSSGAPPPSGGSPAGSPTSTEEGTSESATPESGPGTSTEPSEGSAPGSPAGSPTSTEEGTSTEPSEGSAPGTSTEPSEPKKKRKVMDKKYSIGLAIGTNSVGWAVITDEYKVPSKKFKVLGNTDRHSIKKNLIGALLFDSGETAEATRLKRTARRRYTRRKNRICYLQEIFSNEMAKVDDSFFHRLEESFLVEEDKKHERHPIFGNIVDEVAYHEKYPTIYHLRKKLVDSTDKADLRLIYLALAHMIKFRGHFLIEGDLNPDNSDVDKLFIQLVQTYNQLFEENPINASGVDAKAILSARLSKSRRLENLIAQLPGEKKNGLFGNLIALSLGLTPNFKSNFDLAEDAKLQLSKDTYDDDLDNLLAQIGDQYADLFLAAKNLSDAILLSDILRVNTEITKAPLSASMIKRYDEHHQDLTLLKALVRQQLPEKYKEIFFDQSKNGYAGYIDGGASQEEFYKFIKPILEKMDGTEELLVKLNREDLLRKQRTFDNGSIPHQIHLGELHAILRRQEDFYPFLKDNREKIEKILTFRIPYYVGPLARGNSRFAWMTRKSEETITPWNFEEVVDKGASAQSFIERMTNFDKNLPNEKVLPKHSLLYEYFTVYNELTKVKYVTEGMRKPAFLSGEQKKAIVDLLFKTNRKVTVKQLKEDYFKKIECFDSVEISGVEDRFNASLGTYHDLLKIIKDKDFLDNEENEDILEDIVLTLTLFEDREMIEERLKTYAHLFDDKVMKQLKRRRYTGWGRLSRKLINGIRDKQSGKTILDFLKSDGFANRNFMQLIHDDSLTFKEDIQKAQVSGQGDSLHEHIANLAGSPAIKKGILQTVKVVDELVKVMGRHKPENIVIEMARENQTTQKGQKNSRERMKRIEEGIKELGSQILKEHPVENTQLQNEKLYLYYLQNGRDMYVDQELDINRLSDYDVDAIVPQSFLKDDSIDNKVLTRSDKNRGKSDNVPSEEVVKKMKNYWRQLLNAKLITQRKFDNLTKAERGGLSELDKAGFIKRQLVETRQITKHVAQILDSRMNTKYDENDKLIREVKVITLKSKLVSDFRKDFQFYKVREINNYHHAHDAYLNAVVGTALIKKYPKLESEFVYGDYKVYDVRKMIAKSEQEIGKATAKYFFYSNIMNFFKTEITLANGEIRKRPLIETNGETGEIVWDKGRDFATVRKVLSMPQVNIVKKTEVQTGGFSKESILPKRNSDKLIARKKDWDPKKYGGFDSPTVAYSVLVVAKVEKGKSKKLKSVKELLGITIMERSSFEKNPIDFLEAKGYKEVKKDLIIKLPKYSLFELENGRKRMLASAGELQKGNELALPSKYVNFLYLASHYEKLKGSPEDNEQKQLFVEQHKHYLDEIIEQISEFSKRVILADANLDKVLSAYNKHRDKPIREQAENIIHLFTLTNLGAPAAFKYFDTTIDRKRYTSTKEVLDATLIHQSITGLYETRIDLSQLGGDPKKKRKV

SEQ ID NO: 1124 - protein, 1857 aa, synthetic construct
  REGION 1..1857: note = Description of Artificial Sequence: Synthetic polypeptide
MNSNKDKIKVIKVFEAFAGIGSQFKALKNIARSKNWEIQHSGMVEWFVDAIVSYVAIHSKNFNPKIEQLDKDILSISNDSKMPISEYGIKKINNTIKASYLNYAKKHFNNLFDIKKVNKDNFPKNIDIFTYSFPCQDLSVQGLQKGIDKELNTRSGLLWEIERILEEIKNSFSKEEMPKYLLMENVKNLLSHKNKKNYNTWLKQLEKFGYKSKTYLLNSKNFDNCQNRERVFCLSIRDDYLEKTGFKFKELEKVKNPPKKIKDILVDSSNYKYLNLNKYETTTFRETKSNIISRSLKNYTTFNSENYVYNINGIGPTLTASGANSRIKIETQQGVRYLTPLECFKYMQFDVNDFKKVQSTNLISENKMIYIAGNSIPVKILEAIFNTLEFVNNEEGGPSSGAPPPSGGSPAGSPTSTEEGTSESATPESGPGTSTEPSEGSAPGSPAGSPTSTEEGTSTEPSEGSAPGTSTEPSEPKKKRKVMDKKYSIGLAIGTNSVGWAVITDEYKVPSKKFKVLGNTDRHSIKKNLIGALLFDSGETAEATRLKRTARRRYTRRKNRICYLQEIFSNEMAKVDDSFFHRLEESFLVEEDKKHERHPIFGNIVDEVAYHEKYPTIYHLRKKLVDSTDKADLRLIYLALAHMIKFRGHFLIEGDLNPDNSDVDKLFIQLVQTYNQLFEENPINASGVDAKAILSARLSKSRRLENLIAQLPGEKKNGLFGNLIALSLGLTPNFKSNFDLAEDAKLQLSKDTYDDDLDNLLAQIGDQYADLFLAAKNLSDAILLSDILRVNTEITKAPLSASMIKRYDEHHQDLTLLKALVRQQLPEKYKEIFFDQSKNGYAGYIDGGASQEEFYKFIKPILEKMDGTEELLVKLNREDLLRKQRTFDNGSIPHQIHLGELHAILRRQEDFYPFLKDNREKIEKILTFRIPYYVGPLARGNSRFAWMTRKSEETITPWNFEEVVDKGASAQSFIERMTNFDKNLPNEKVLPKHSLLYEYFTVYNELTKVKYVTEGMRKPAFLSGEQKKAIVDLLFKTNRKVTVKQLKEDYFKKIECFDSVEISGVEDRFNASLGTYHDLLKIIKDKDFLDNEENEDILEDIVLTLTLFEDREMIEERLKTYAHLFDDKVMKQLKRRRYTGWGRLSRKLINGIRDKQSGKTILDFLKSDGFANRNFMQLIHDDSLTFKEDIQKAQVSGQGDSLHEHIANLAGSPAIKKGILQTVKVVDELVKVMGRHKPENIVIEMARENQTTQKGQKNSRERMKRIEEGIKELGSQILKEHPVENTQLQNEKLYLYYLQNGRDMYVDQELDINRLSDYDVDAIVPQSFLKDDSIDNKVLTRSDKNRGKSDNVPSEEVVKKMKNYWRQLLNAKLITQRKFDNLTKAERGGLSELDKAGFIKRQLVETRQITKHVAQILDSRMNTKYDENDKLIREVKVITLKSKLVSDFRKDFQFYKVREINNYHHAHDAYLNAVVGTALIKKYPKLESEFVYGDYKVYDVRKMIAKSEQEIGKATAKYFFYSNIMNFFKTEITLANGEIRKRPLIETNGETGEIVWDKGRDFATVRKVLSMPQVNIVKKTEVQTGGFSKESILPKRNSDKLIARKKDWDPKKYGGFDSPTVAYSVLVVAKVEKGKSKKLKSVKELLGITIMERSSFEKNPIDFLEAKGYKEVKKDLIIKLPKYSLFELENGRKRMLASAGELQKGNELALPSKYVNFLYLASHYEKLKGSPEDNEQKQLFVEQHKHYLDEIIEQISEFSKRVILADANLDKVLSAYNKHRDKPIREQAENIIHLFTLTNLGAPAAFKYFDTTIDRKRYTSTKEVLDATLIHQSITGLYETRIDLSQLGGDPKKKRKV

SEQ ID NO: 1125 - protein, 1848 aa, synthetic construct
  REGION 1..1848: note = Description of Artificial Sequence: Synthetic polypeptide
MSKVENKTKKLRVFEAFAGIGAQRKALEKVRKDEYEIVGLAEWYVPAIVMYQAIHNNFHTKLEYKSVSREEMIDYLENKTLSWNSKNPVSNGYWKRKKDDELKIIYNAIKLSEKEGNIFDIRDLYKRTLKNIDLLTYSFPCQDLSQQGIQKGMKRGSGTRSGLLWEIERALDSTEKNDLPKYLLMENVGALLHKKNEEELNQWKQKLESLGYQNSIEVLNAADFGSSQARRRVFMISTLNEFVELPKGDKKPKSIKKVLNKIVSEKDILNNLLKYNLTEFKKTKSNINKASLIGYSKFNSEGYVYDPEFTGPTLTASGANSRIKIKDGSNIRKMNSDETFLYIGFDSQDGKRVNEIEFLTENQKIFVCGNSISVEVLEAIIDKIGGGGPSSGAPPPSGGSPAGSPTSTEEGTSESATPESGPGTSTEPSEGSAPGSPAGSPTSTEEGTSTEPSEGSAPGTSTEPSEPKKKRKVMDKKYSIGLAIGTNSVGWAVITDEYKVPSKKFKVLGNTDRHSIKKNLIGALLFDSGETAEATRLKRTARRRYTRRKNRICYLQEIFSNEMAKVDDSFFHRLEESFLVEEDKKHERHPIFGNIVDEVAYHEKYPTIYHLRKKLVDSTDKADLRLIYLALAHMIKFRGHFLIEGDLNPDNSDVDKLFIQLVQTYNQLFEENPINASGVDAKAILSARLSKSRRLENLIAQLPGEKKNGLFGNLIALSLGLTPNFKSNFDLAEDAKLQLSKDTYDDDLDNLLAQIGDQYADLFLAAKNLSDAILLSDILRVNTEITKAPLSASMIKRYDEHHQDLTLLKALVRQQLPEKYKEIFFDQSKNGYAGYIDGGASQEEFYKFIKPILEKMDGTEELLVKLNREDLLRKQRTFDNGSIPHQIHLGELHAILRRQEDFYPFLKDNREKIEKILTFRIPYYVGPLARGNSRFAWMTRKSEETITPWNFEEVVDKGASAQSFIERMTNFDKNLPNEKVLPKHSLLYEYFTVYNELTKVKYVTEGMRKPAFLSGEQKKAIVDLLFKTNRKVTVKQLKEDYFKKIECFDSVEISGVEDRFNASLGTYHDLLKIIKDKDFLDNEENEDILEDIVLTLTLFEDREMIEERLKTYAHLFDDKVMKQLKRRRYTGWGRLSRKLINGIRDKQSGKTILDFLKSDGFANRNFMQLIHDDSLTFKEDIQKAQVSGQGDSLHEHIANLAGSPAIKKGILQTVKVVDELVKVMGRHKPENIVIEMARENQTTQKGQKNSRERMKRIEEGIKELGSQILKEHPVENTQLQNEKLYLYYLQNGRDMYVDQELDINRLSDYDVDAIVPQSFLKDDSIDNKVLTRSDKNRGKSDNVPSEEVVKKMKNYWRQLLNAKLITQRKFDNLTKAERGGLSELDKAGFIKRQLVETRQITKHVAQILDSRMNTKYDENDKLIREVKVITLKSKLVSDFRKDFQFYKVREINNYHHAHDAYLNAVVGTALIKKYPKLESEFVYGDYKVYDVRKMIAKSEQEIGKATAKYFFYSNIMNFFKTEITLANGEIRKRPLIETNGETGEIVWDKGRDFATVRKVLSMPQVNIVKKTEVQTGGFSKESILPKRNSDKLIARKKDWDPKKYGGFDSPTVAYSVLVVAKVEKGKSKKLKSVKELLGITIMERSSFEKNPIDFLEAKGYKEVKKDLIIKLPKYSLFELENGRKRMLASAGELQKGNELALPSKYVNFLYLASHYEKLKGSPEDNEQKQLFVEQHKHYLDEIIEQISEFSKRVILADANLDKVLSAYNKHRDKPIREQAENIIHLFTLTNLGAPAAFKYFDTTIDRKRYTSTKEVLDATLIHQSITGLYETRIDLSQLGGDPKKKRKV

SEQ ID NO: 1126 - protein, 1820 aa, synthetic construct
  REGION 1..1820: note = Description of Artificial Sequence: Synthetic polypeptide
MKDVLDDNLLEEPAAQYSLFEPESNPNLREKFTFIDLFAGIGGFRIAMQNLGGKCIFSSEWDEQAQKTYEANFGDLPYGDITLEETKAFIPEKFDILCAGFPCQAFSIAGKRGGFEDTRGTLFFDVAEIIRRHQPKAFFLENVKGLKNHDKGRTLKTILNVLREDLGYFVPEPAIVNAKNFGVPQNRERIYIVGFHKSTGVNSFSYPEPLDKIVTFADIREEKTVPTKYYLSTQYIDTLRKHKERHESKGNGFGYEIIPDDGIANAIVVGGMGRERNLVIDHRITDFTPTTNIKGEVNREGIRKMTPREWARLQGFPDSYVIPVSDASAYKQFGNSVAVPAIQATGKKILEKLGNLYDGGPSSGAPPPSGGSPAGSPTSTEEGTSESATPESGPGTSTEPSEGSAPGSPAGSPTSTEEGTSTEPSEGSAPGTSTEPSEPKKKRKVMDKKYSIGLAIGTNSVGWAVITDEYKVPSKKFKVLGNTDRHSIKKNLIGALLFDSGETAEATRLKRTARRRYTRRKNRICYLQEIFSNEMAKVDDSFFHRLEESFLVEEDKKHERHPIFGNIVDEVAYHEKYPTIYHLRKKLVDSTDKADLRLIYLALAHMIKFRGHFLIEGDLNPDNSDVDKLFIQLVQTYNQLFEENPINASGVDAKAILSARLSKSRRLENLIAQLPGEKKNGLFGNLIALSLGLTPNFKSNFDLAEDAKLQLSKDTYDDDLDNLLAQIGDQYADLFLAAKNLSDAILLSDILRVNTEITKAPLSASMIKRYDEHHQDLTLLKALVRQQLPEKYKEIFFDQSKNGYAGYIDGGASQEEFYKFIKPILEKMDGTEELLVKLNREDLLRKQRTFDNGSIPHQIHLGELHAILRRQEDFYPFLKDNREKIEKILTFRIPYYVGPLARGNSRFAWMTRKSEETITPWNFEEVVDKGASAQSFIERMTNFDKNLPNEKVLPKHSLLYEYFTVYNELTKVKYVTEGMRKPAFLSGEQKKAIVDLLFKTNRKVTVKQLKEDYFKKIECFDSVEISGVEDRFNASLGTYHDLLKIIKDKDFLDNEENEDILEDIVLTLTLFEDREMIEERLKTYAHLFDDKVMKQLKRRRYTGWGRLSRKLINGIRDKQSGKTILDFLKSDGFANRNFMQLIHDDSLTFKEDIQKAQVSGQGDSLHEHIANLAGSPAIKKGILQTVKVVDELVKVMGRHKPENIVIEMARENQTTQKGQKNSRERMKRIEEGIKELGSQILKEHPVENTQLQNEKLYLYYLQNGRDMYVDQELDINRLSDYDVDAIVPQSFLKDDSIDNKVLTRSDKNRGKSDNVPSEEVVKKMKNYWRQLLNAKLITQRKFDNLTKAERGGLSELDKAGFIKRQLVETRQITKHVAQILDSRMNTKYDENDKLIREVKVITLKSKLVSDFRKDFQFYKVREINNYHHAHDAYLNAVVGTALIKKYPKLESEFVYGDYKVYDVRKMIAKSEQEIGKATAKYFFYSNIMNFFKTEITLANGEIRKRPLIETNGETGEIVWDKGRDFATVRKVLSMPQVNIVKKTEVQTGGFSKESILPKRNSDKLIARKKDWDPKKYGGFDSPTVAYSVLVVAKVEKGKSKKLKSVKELLGITIMERSSFEKNPIDFLEAKGYKEVKKDLIIKLPKYSLFELENGRKRMLASAGELQKGNELALPSKYVNFLYLASHYEKLKGSPEDNEQKQLFVEQHKHYLDEIIEQISEFSKRVILADANLDKVLSAYNKHRDKPIREQAENIIHLFTLTNLGAPAAFKYFDTTIDRKRYTSTKEVLDATLIHQSITGLYETRIDLSQLGGDPKKKRKV

SEQ ID NO: 1127 - protein, 1983 aa, synthetic construct
  REGION 1..1983: note = Description of Artificial Sequence: Synthetic polypeptide
MSKANAKYSFVDLFAGIGGFHAALAATGGVCEYAVEIDREAAAVYERNWNKPALGDITDDANDEGVTLRGYDGPIDVLTGGFPCQPFSKSGAQHGMAETRGTLFWNIARIIEEREPTVLILENVRNLVGPRHRHEWLTIIETLRFFGYEVSGAPAIFSPHLLPAWMGGTPQVRERVFITATLVPERMRDERIPRTETGEIDAEAIGPKPVATMNDRFPIKKGGTELFHPGDRKSGWNLLTSGIIREGDPEPSNVDLRLTETETLWIDAWDDLESTIRRATGRPLEGFPYWADSWTDFRELSRLVVIRGFQAPEREVVGDRKRYVARTDMPEGFVPASVTRPAIDETLPAWKQSHLRRNYDFFERHFAEVVAWAYRWGVYTDLFPASRRKLEWQAQDAPRLWDTVMHFRPSGIRAKRPTYLPALVAITQTSIVGPLERRLSPRETARLQGLPEWFDFGEQRAAATYKQMGNGVNVGVVRHILREHVRRDRALLKLTPAGQRIINAVLADEPDATVGALGAAEGGPSSGAPPPSGGSPAGSPTSTEEGTSESATPESGPGTSTEPSEGSAPGSPAGSPTSTEEGTSTEPSEGSAPGTSTEPSEPKKKRKVMDKKYSIGLAIGTNSVGWAVITDEYKVPSKKFKVLGNTDRHSIKKNLIGALLFDSGETAEATRLKRTARRRYTRRKNRICYLQEIFSNEMAKVDDSFFHRLEESFLVEEDKKHERHPIFGNIVDEVAYHEKYPTIYHLRKKLVDSTDKADLRLIYLALAHMIKFRGHFLIEGDLNPDNSDVDKLFIQLVQTYNQLFEENPINASGVDAKAILSARLSKSRRLENLIAQLPGEKKNGLFGNLIALSLGLTPNFKSNFDLAEDAKLQLSKDTYDDDLDNLLAQIGDQYADLFLAAKNLSDAILLSDILRVNTEITKAPLSASMIKRYDEHHQDLTLLKALVRQQLPEKYKEIFFDQSKNGYAGYIDGGASQEEFYKFIKPILEKMDGTEELLVKLNREDLLRKQRTFDNGSIPHQIHLGELHAILRRQEDFYPFLKDNREKIEKILTFRIPYYVGPLARGNSRFAWMTRKSEETITPWNFEEVVDKGASAQSFIERMTNFDKNLPNEKVLPKHSLLYEYFTVYNELTKVKYVTEGMRKPAFLSGEQKKAIVDLLFKTNRKVTVKQLKEDYFKKIECFDSVEISGVEDRFNASLGTYHDLLKIIKDKDFLDNEENEDILEDIVLTLTLFEDREMIEERLKTYAHLFDDKVMKQLKRRRYTGWGRLSRKLINGIRDKQSGKTILDFLKSDGFANRNFMQLIHDDSLTFKEDIQKAQVSGQGDSLHEHIANLAGSPAIKKGILQTVKVVDELVKVMGRHKPENIVIEMARENQTTQKGQKNSRERMKRIEEGIKELGSQILKEHPVENTQLQNEKLYLYYLQNGRDMYVDQELDINRLSDYDVDAIVPQSFLKDDSIDNKVLTRSDKNRGKSDNVPSEEVVKKMKNYWRQLLNAKLITQRKFDNLTKAERGGLSELDKAGFIKRQLVETRQITKHVAQILDSRMNTKYDENDKLIREVKVITLKSKLVSDFRKDFQFYKVREINNYHHAHDAYLNAVVGTALIKKYPKLESEFVYGDYKVYDVRKMIAKSEQEIGKATAKYFFYSNIMNFFKTEITLANGEIRKRPLIETNGETGEIVWDKGRDFATVRKVLSMPQVNIVKKTEVQTGGFSKESILPKRNSDKLIARKKDWDPKKYGGFDSPTVAYSVLVVAKVEKGKSKKLKSVKELLGITIMERSSFEKNPIDFLEAKGYKEVKKDLIIKLPKYSLFELENGRKRMLASAGELQKGNELALPSKYVNFLYLASHYEKLKGSPEDNEQKQLFVEQHKHYLDEIIEQISEFSKRVILADANLDKVLSAYNKHRDKPIREQAENIIHLFTLTNLGAPAAFKYFDTTIDRKRYTSTKEVLDATLIHQSITGLYETRIDLSQLGGDPKKKRKV

SEQ ID NO: 1128 - protein, 1901 aa, synthetic construct
  REGION 1..1901: note = Description of Artificial Sequence: Synthetic polypeptide
MSKANAKYSFVDLFAGIGGFHAALAATGGVCEYAVEIDREAAAVYERNWNKPALGDITDDANDEGVTLRGYDGPIDVLTGGFPCQPFSKSGAQHGMAETRGTLFWNIARIIEEREPTVLILENVRNLVGPRHRHEWLTIIETLRFFGYEVSGAPAIFSPHLLPAWMGGTPQVRERVFITATLVPERMRDERSTIRRATGRPLEGFPYWADSWTDFRELSRLVVIRGFQAPEREVVGDRKRYVARTDMPEGFVPASVTRPAIDETLPAWKQSHLRRNYDFFERHFAEVVAWAYRWGVYTDLFPASRRKLEWQAQDAPRLWDTVMHFRPSGIRAKRPTYLPALVAITQTSIVGPLERRLSPRETARLQGLPEWFDFGEQRAAATYKQMGNGVNVGVVRHILREHVRRDRALLKLTPAGQRIINAVLADEPDATVGALGAAEGGPSSGAPPPSGGSPAGSPTSTEEGTSESATPESGPGTSTEPSEGSAPGSPAGSPTSTEEGTSTEPSEGSAPGTSTEPSEPKKKRKVMDKKYSIGLAIGTNSVGWAVITDEYKVPSKKFKVLGNTDRHSIKKNLIGALLFDSGETAEATRLKRTARRRYTRRKNRICYLQEIFSNEMAKVDDSFFHRLEESFLVEEDKKHERHPIFGNIVDEVAYHEKYPTIYHLRKKLVDSTDKADLRLIYLALAHMIKFRGHFLIEGDLNPDNSDVDKLFIQLVQTYNQLFEENPINASGVDAKAILSARLSKSRRLENLIAQLPGEKKNGLFGNLIALSLGLTPNFKSNFDLAEDAKLQLSKDTYDDDLDNLLAQIGDQYADLFLAAKNLSDAILLSDILRVNTEITKAPLSASMIKRYDEHHQDLTLLKALVRQQLPEKYKEIFFDQSKNGYAGYIDGGASQEEFYKFIKPILEKMDGTEELLVKLNREDLLRKQRTFDNGSIPHQIHLGELHAILRRQEDFYPFLKDNREKIEKILTFRIPYYVGPLARGNSRFAWMTRKSEETITPWNFEEVVDKGASAQSFIERMTNFDKNLPNEKVLPKHSLLYEYFTVYNELTKVKYVTEGMRKPAFLSGEQKKAIVDLLFKTNRKVTVKQLKEDYFKKIECFDSVEISGVEDRFNASLGTYHDLLKIIKDKDFLDNEENEDILEDIVLTLTLFEDREMIEERLKTYAHLFDDKVMKQLKRRRYTGWGRLSRKLINGIRDKQSGKTILDFLKSDGFANRNFMQLIHDDSLTFKEDIQKAQVSGQGDSLHEHIANLAGSPAIKKGILQTVKVVDELVKVMGRHKPENIVIEMARENQTTQKGQKNSRERMKRIEEGIKELGSQILKEHPVENTQLQNEKLYLYYLQNGRDMYVDQELDINRLSDYDVDAIVPQSFLKDDSIDNKVLTRSDKNRGKSDNVPSEEVVKKMKNYWRQLLNAKLITQRKFDNLTKAERGGLSELDKAGFIKRQLVETRQITKHVAQILDSRMNTKYDENDKLIREVKVITLKSKLVSDFRKDFQFYKVREINNYHHAHDAYLNAVVGTALIKKYPKLESEFVYGDYKVYDVRKMIAKSEQEIGKATAKYFFYSNIMNFFKTEITLANGEIRKRPLIETNGETGEIVWDKGRDFATVRKVLSMPQVNIVKKTEVQTGGFSKESILPKRNSDKLIARKKDWDPKKYGGFDSPTVAYSVLVVAKVEKGKSKKLKSVKELLGITIMERSSFEKNPIDFLEAKGYKEVKKDLIIKLPKYSLFELENGRKRMLASAGELQKGNELALPSKYVNFLYLASHYEKLKGSPEDNEQKQLFVEQHKHYLDEIIEQISEFSKRVILADANLDKVLSAYNKHRDKPIREQAENIIHLFTLTNLGAPAAFKYFDTTIDRKRYTSTKEVLDATLIHQSITGLYETRIDLSQLGGDPKKKRKV

SEQ ID NO: 1129 - protein, 1792 aa, synthetic construct
  REGION 1..1792: note = Description of Artificial Sequence: Synthetic polypeptide
MNLISLFSGAGGLDLGFQKAGFRIICANEYDKSIWKTYESNHSAKLIKGDISKISSDEFPKCDGIIGGPPCQSWSEGGSLRGIDDPRGKLFYEYIRILKQKKPIFFLAENVKGMMAQRHNKAVQEFIQEFDNAGYDVHIILLNANDYGVAQDRKRVFYIGFRKELNINYLPPIPHLIKPTFKDVIWDLKDNPIPALDKNKTNGNKCIYPNHEYFIGSYSTIFMSRNRVRQWNEPAFTVQASGRQCQLHPQAPVMLKVSKNLNKFVEGKEHLYRRLTVRECARVQGFPDDFIFHYESLNDGYKMIGNAVPVNLAYEIAKTIKSALEICKGNGGPSSGAPPPSGGSPAGSPTSTEEGTSESATPESGPGTSTEPSEGSAPGSPAGSPTSTEEGTSTEPSEGSAPGTSTEPSEPKKKRKVMDKKYSIGLAIGTNSVGWAVITDEYKVPSKKFKVLGNTDRHSIKKNLIGALLFDSGETAEATRLKRTARRRYTRRKNRICYLQEIFSNEMAKVDDSFFHRLEESFLVEEDKKHERHPIFGNIVDEVAYHEKYPTIYHLRKKLVDSTDKADLRLIYLALAHMIKFRGHFLIEGDLNPDNSDVDKLFIQLVQTYNQLFEENPINASGVDAKAILSARLSKSRRLENLIAQLPGEKKNGLFGNLIALSLGLTPNFKSNFDLAEDAKLQLSKDTYDDDLDNLLAQIGDQYADLFLAAKNLSDAILLSDILRVNTEITKAPLSASMIKRYDEHHQDLTLLKALVRQQLPEKYKEIFFDQSKNGYAGYIDGGASQEEFYKFIKPILEKMDGTEELLVKLNREDLLRKQRTFDNGSIPHQIHLGELHAILRRQEDFYPFLKDNREKIEKILTFRIPYYVGPLARGNSRFAWMTRKSEETITPWNFEEVVDKGASAQSFIERMTNFDKNLPNEKVLPKHSLLYEYFTVYNELTKVKYVTEGMRKPAFLSGEQKKAIVDLLFKTNRKVTVKQLKEDYFKKIECFDSVEISGVEDRFNASLGTYHDLLKIIKDKDFLDNEENEDILEDIVLTLTLFEDREMIEERLKTYAHLFDDKVMKQLKRRRYTGWGRLSRKLINGIRDKQSGKTILDFLKSDGFANRNFMQLIHDDSLTFKEDIQKAQVSGQGDSLHEHIANLAGSPAIKKGILQTVKVVDELVKVMGRHKPENIVIEMARENQTTQKGQKNSRERMKRIEEGIKELGSQILKEHPVENTQLQNEKLYLYYLQNGRDMYVDQELDINRLSDYDVDAIVPQSFLKDDSIDNKVLTRSDKNRGKSDNVPSEEVVKKMKNYWRQLLNAKLITQRKFDNLTKAERGGLSELDKAGFIKRQLVETRQITKHVAQILDSRMNTKYDENDKLIREVKVITLKSKLVSDFRKDFQFYKVREINNYHHAHDAYLNAVVGTALIKKYPKLESEFVYGDYKVYDVRKMIAKSEQEIGKATAKYFFYSNIMNFFKTEITLANGEIRKRPLIETNGETGEIVWDKGRDFATVRKVLSMPQVNIVKKTEVQTGGFSKESILPKRNSDKLIARKKDWDPKKYGGFDSPTVAYSVLVVAKVEKGKSKKLKSVKELLGITIMERSSFEKNPIDFLEAKGYKEVKKDLIIKLPKYSLFELENGRKRMLASAGELQKGNELALPSKYVNFLYLASHYEKLKGSPEDNEQKQLFVEQHKHYLDEIIEQISEFSKRVILADANLDKVLSAYNKHRDKPIREQAENIIHLFTLTNLGAPAAFKYFDTTIDRKRYTSTKEVLDATLIHQSITGLYETRIDLSQLGGDPKKKRKV

SEQ ID NO: 1130 - protein, 1792 aa, synthetic construct
  REGION 1..1792: note = Description of Artificial Sequence: Synthetic polypeptide
MNLISLFSGAGGLDLGFQKAGFRIICANEYDKSIWKTYESNHSAKLIKGDISKISSDEFPKCDGIIGGPPCQSWSEGGSLRGIDDPRGKLFYEYIRILKQKKPIFFLAENVKGMMAQRHNKAVQEFIQEFDNAGYDVHIILLNANDYGVAQDRKRVFYIGFRKELNINYLPPIPHLIKPTFKDVIWDLKDNPIPALDKNKTNGNKCIYPNHEYFIGSYSTIFMSANRVRQWNEPAFTVQASGRQCQLHPQAPVMLKVSKLMWKFVEGKEHLYRRLTVRECARVQGFPDDFIFHYESLNDGYKMIGNAVPVNLAYEIAKTIKSALEICKGNGGPSSGAPPPSGGSPAGSPTSTEEGTSESATPESGPGTSTEPSEGSAPGSPAGSPTSTEEGTSTEPSEGSAPGTSTEPSEPKKKRKVMDKKYSIGLAIGTNSVGWAVITDEYKVPSKKFKVLGNTDRHSIKKNLIGALLFDSGETAEATRLKRTARRRYTRRKNRICYLQEIFSNEMAKVDDSFFHRLEESFLVEEDKKHERHPIFGNIVDEVAYHEKYPTIYHLRKKLVDSTDKADLRLIYLALAHMIKFRGHFLIEGDLNPDNSDVDKLFIQLVQTYNQLFEENPINASGVDAKAILSARLSKSRRLENLIAQLPGEKKNGLFGNLIALSLGLTPNFKSNFDLAEDAKLQLSKDTYDDDLDNLLAQIGDQYADLFLAAKNLSDAILLSDILRVNTEITKAPLSASMIKRYDEHHQDLTLLKALVRQQLPEKYKEIFFDQSKNGYAGYIDGGASQEEFYKFIKPILEKMDGTEELLVKLNREDLLRKQRTFDNGSIPHQIHLGELHAILRRQEDFYPFLKDNREKIEKILTFRIPYYVGPLARGNSRFAWMTRKSEETITPWNFEEVVDKGASAQSFIERMTNFDKNLPNEKVLPKHSLLYEYFTVYNELTKVKYVTEGMRKPAFLSGEQKKAIVDLLFKTNRKVTVKQLKEDYFKKIECFDSVEISGVEDRFNASLGTYHDLLKIIKDKDFLDNEENEDILEDIVLTLTLFEDREMIEERLKTYAHLFDDKVMKQLKRRRYTGWGRLSRKLINGIRDKQSGKTILDFLKSDGFANRNFMQLIHDDSLTFKEDIQKAQVSGQGDSLHEHIANLAGSPAIKKGILQTVKVVDELVKVMGRHKPENIVIEMARENQTTQKGQKNSRERMKRIEEGIKELGSQILKEHPVENTQLQNEKLYLYYLQNGRDMYVDQELDINRLSDYDVDAIVPQSFLKDDSIDNKVLTRSDKNRGKSDNVPSEEVVKKMKNYWRQLLNAKLITQRKFDNLTKAERGGLSELDKAGFIKRQLVETRQITKHVAQILDSRMNTKYDENDKLIREVKVITLKSKLVSDFRKDFQFYKVREINNYHHAHDAYLNAVVGTALIKKYPKLESEFVYGDYKVYDVRKMIAKSEQEIGKATAKYFFYSNIMNFFKTEITLANGEIRKRPLIETNGETGEIVWDKGRDFATVRKVLSMPQVNIVKKTEVQTGGFSKESILPKRNSDKLIARKKDWDPKKYGGFDSPTVAYSVLVVAKVEKGKSKKLKSVKELLGITIMERSSFEKNPIDFLEAKGYKEVKKDLIIKLPKYSLFELENGRKRMLASAGELQKGNELALPSKYVNFLYLASHYEKLKGSPEDNEQKQLFVEQHKHYLDEIIEQISEFSKRVILADANLDKVLSAYNKHRDKPIREQAENIIHLFTLTNLGAPAAFKYFDTTIDRKRYTSTKEVLDATLIHQSITGLYETRIDLSQLGGDPKKKRKV

SEQ ID NO: 1131 - protein, 1789 aa, synthetic construct
  REGION 1..1789: note = Description of Artificial Sequence: Synthetic polypeptide
MIEIKDKQLTGLRFIDLFAGLGGFRLALESCGAECVYSNEWDKYAQEVYEMNFGEKPEGDITQVNEKTIPDHDILCAGFPCQAFSISGKQKGFEDSRGTLFFDIARIVREKKPKVVFMENVKNFASHDNGNTLEVVKNTMNELDYSFHAKVLNALDYGIPQKRERIYMICFRNDLNIQNFQFPKPFELNTFVKDLLLPDSEVEHLVIDRKDLVMTNQEIEQTTPKTVRLGIVGKGGQGERIYSTRGIAITLSAYGGGIFAKTGGYLVNGKTRKLHPRECARVMGYPDSYKVHPSTSQAYKQFGNSVVINVLQYIAYNIGSSLNFKPYGGPSSGAPPPSGGSPAGSPTSTEEGTSESATPESGPGTSTEPSEGSAPGSPAGSPTSTEEGTSTEPSEGSAPGTSTEPSEPKKKRKVMDKKYSIGLAIGTNSVGWAVITDEYKVPSKKFKVLGNTDRHSIKKNLIGALLFDSGETAEATRLKRTARRRYTRRKNRICYLQEIFSNEMAKVDDSFFHRLEESFLVEEDKKHERHPIFGNIVDEVAYHEKYPTIYHLRKKLVDSTDKADLRLIYLALAHMIKFRGHFLIEGDLNPDNSDVDKLFIQLVQTYNQLFEENPINASGVDAKAILSARLSKSRRLENLIAQLPGEKKNGLFGNLIALSLGLTPNFKSNFDLAEDAKLQLSKDTYDDDLDNLLAQIGDQYADLFLAAKNLSDAILLSDILRVNTEITKAPLSASMIKRYDEHHQDLTLLKALVRQQLPEKYKEIFFDQSKNGYAGYIDGGASQEEFYKFIKPILEKMDGTEELLVKLNREDLLRKQRTFDNGSIPHQIHLGELHAILRRQEDFYPFLKDNREKIEKILTFRIPYYVGPLARGNSRFAWMTRKSEETITPWNFEEVVDKGASAQSFIERMTNFDKNLPNEKVLPKHSLLYEYFTVYNELTKVKYVTEGMRKPAFLSGEQKKAIVDLLFKTNRKVTVKQLKEDYFKKIECFDSVEISGVEDRFNASLGTYHDLLKIIKDKDFLDNEENEDILEDIVLTLTLFEDREMIEERLKTYAHLFDDKVMKQLKRRRYTGWGRLSRKLINGIRDKQSGKTILDFLKSDGFANRNFMQLIHDDSLTFKEDIQKAQVSGQGDSLHEHIANLAGSPAIKKGILQTVKVVDELVKVMGRHKPENIVIEMARENQTTQKGQKNSRERMKRIEEGIKELGSQILKEHPVENTQLQNEKLYLYYLQNGRDMYVDQELDINRLSDYDVDAIVPQSFLKDDSIDNKVLTRSDKNRGKSDNVPSEEVVKKMKNYWRQLLNAKLITQRKFDNLTKAERGGLSELDKAGFIKRQLVETRQITKHVAQILDSRMNTKYDENDKLIREVKVITLKSKLVSDFRKDFQFYKVREINNYHHAHDAYLNAVVGTALIKKYPKLESEFVYGDYKVYDVRKMIAKSEQEIGKATAKYFFYSNIMNFFKTEITLANGEIRKRPLIETNGETGEIVWDKGRDFATVRKVLSMPQVNIVKKTEVQTGGFSKESILPKRNSDKLIARKKDWDPKKYGGFDSPTVAYSVLVVAKVEKGKSKKLKSVKELLGITIMERSSFEKNPIDFLEAKGYKEVKKDLIIKLPKYSLFELENGRKRMLASAGELQKGNELALPSKYVNFLYLASHYEKLKGSPEDNEQKQLFVEQHKHYLDEIIEQISEFSKRVILADANLDKVLSAYNKHRDKPIREQAENIIHLFTLTNLGAPAAFKYFDTTIDRKRYTSTKEVLDATLIHQSITGLYETRIDLSQLGGDPKKKRKV

SEQ ID NO: 1132 - protein, 1880 aa, synthetic construct
  REGION 1..1880: note = Description of Artificial Sequence: Synthetic polypeptide
MKPEILKLIRSKLDLTQKQASEIIEVSDKTWQQWESGKTEMHPAYYSFLQEKLKDKINFEELSAQKTLQKKIFDKYNQNQITKNAEELAEITHIEERKDAYSSDFKFIDLFSGIGGIRQSFEVNGGKCVFSSEIDPFAKFTYYTNFGVVPFGDITKVEATTIPQHDILCAGFPCQPFSHIGKREGFEHPTQGTMFHEIVRIIETKKTPVLFLENVPGLINHDDGNTLKVIIETLEDMGYKVHHTVLDASHFGIPQKRKRFYLVAFLNQNIHFEFPKPPMISKDIGEVLESDVTGYSISEHLQKSYLFKKDDGKPSLIDKNTTGAVKTLVSTYHKIQRLTGTFVKDGETGIRLLTTNECKAIMGFPKDFVIPVSRTQMYRQMGNSVVVPVVTKIAEQISLALKTVNQQSPQENFELELVGGPSSGAPPPSGGSPAGSPTSTEEGTSESATPESGPGTSTEPSEGSAPGSPAGSPTSTEEGTSTEPSEGSAPGTSTEPSEPKKKRKVMDKKYSIGLAIGTNSVGWAVITDEYKVPSKKFKVLGNTDRHSIKKNLIGALLFDSGETAEATRLKRTARRRYTRRKNRICYLQEIFSNEMAKVDDSFFHRLEESFLVEEDKKHERHPIFGNIVDEVAYHEKYPTIYHLRKKLVDSTDKADLRLIYLALAHMIKFRGHFLIEGDLNPDNSDVDKLFIQLVQTYNQLFEENPINASGVDAKAILSARLSKSRRLENLIAQLPGEKKNGLFGNLIALSLGLTPNFKSNFDLAEDAKLQLSKDTYDDDLDNLLAQIGDQYADLFLAAKNLSDAILLSDILRVNTEITKAPLSASMIKRYDEHHQDLTLLKALVRQQLPEKYKEIFFDQSKNGYAGYIDGGASQEEFYKFIKPILEKMDGTEELLVKLNREDLLRKQRTFDNGSIPHQIHLGELHAILRRQEDFYPFLKDNREKIEKILTFRIPYYVGPLARGNSRFAWMTRKSEETITPWNFEEVVDKGASAQSFIERMTNFDKNLPNEKVLPKHSLLYEYFTVYNELTKVKYVTEGMRKPAFLSGEQKKAIVDLLFKTNRKVTVKQLKEDYFKKIECFDSVEISGVEDRFNASLGTYHDLLKIIKDKDFLDNEENEDILEDIVLTLTLFEDREMIEERLKTYAHLFDDKVMKQLKRRRYTGWGRLSRKLINGIRDKQSGKTILDFLKSDGFANRNFMQLIHDDSLTFKEDIQKAQVSGQGDSLHEHIANLAGSPAIKKGILQTVKVVDELVKVMGRHKPENIVIEMARENQTTQKGQKNSRERMKRIEEGIKELGSQILKEHPVENTQLQNEKLYLYYLQNGRDMYVDQELDINRLSDYDVDAIVPQSFLKDDSIDNKVLTRSDKNRGKSDNVPSEEVVKKMKNYWRQLLNAKLITQRKFDNLTKAERGGLSELDKAGFIKRQLVETRQITKHVAQILDSRMNTKYDENDKLIREVKVITLKSKLVSDFRKDFQFYKVREINNYHHAHDAYLNAVVGTALIKKYPKLESEFVYGDYKVYDVRKMIAKSEQEIGKATAKYFFYSNIMNFFKTEITLANGEIRKRPLIETNGETGEIVWDKGRDFATVRKVLSMPQVNIVKKTEVQTGGFSKESILPKRNSDKLIARKKDWDPKKYGGFDSPTVAYSVLVVAKVEKGKSKKLKSVKELLGITIMERSSFEKNPIDFLEAKGYKEVKKDLIIKLPKYSLFELENGRKRMLASAGELQKGNELALPSKYVNFLYLASHYEKLKGSPEDNEQKQLFVEQHKHYLDEIIEQISEFSKRVILADANLDKVLSAYNKHRDKPIREQAENIIHLFTLTNLGAPAAFKYFDTTIDRKRYTSTKEVLDATLIHQSITGLYETRIDLSQLGGDPKKKRKV

SEQ ID NO: 1133 - protein, 1999 aa, synthetic construct
  REGION 1..1999: note = Description of Artificial Sequence: Synthetic polypeptide
MSERRYEAGMTVALHEGSFLKIQRVYIRQYHADNRREHMLVGPLFRRTKYLKALSKKVNEVAIVHESIHVPVQDVIGVRELIITNRPFPECRKGDEHTGRLVCRWVYNLDERAKGREYKKQRYIRRITEAEADPEYRVEDRVLRRRWFQEGYIGDEISYKEHGNGDIVDIRSESPLQVLDGWGGDLVDLENGEETSIPGPCRSASSYGRLMKPPLAQAADSNTSRKYTFGDTFCGGGGVSLGARQAGLEVKWAFDMNPNAGANYRRNFPNTDFFLAEAEQFIQLSVGISQHVDILHLSPPCQTFSRAHTIAGKNDENNEASFFAVVNLIKAVRPRLFTVEETDGIMDRQSRQFIDTALMGITELGYSFRICVLNAIEYGVCQNRKRLIIIGAAPGEELPPFPLPTHQDFFSKDPRRDLLPAVTLDDALSTITPESTDHHLNHVWQPAEWKTPYDAHRPFKNAIRAGGGEYDIYPDGRRKFTVRELACIQGFPDEYEFVGTLTDKRRIIGNAVPPPLSAAIMSTLRQWMTEKDFERMEGGPSSGAPPPSGGSPAGSPTSTEEGTSESATPESGPGTSTEPSEGSAPGSPAGSPTSTEEGTSTEPSEGSAPGTSTEPSEPKKKRKVMDKKYSIGLAIGTNSVGWAVITDEYKVPSKKFKVLGNTDRHSIKKNLIGALLFDSGETAEATRLKRTARRRYTRRKNRICYLQEIFSNEMAKVDDSFFHRLEESFLVEEDKKHERHPIFGNIVDEVAYHEKYPTIYHLRKKLVDSTDKADLRLIYLALAHMIKFRGHFLIEGDLNPDNSDVDKLFIQLVQTYNQLFEENPINASGVDAKAILSARLSKSRRLENLIAQLPGEKKNGLFGNLIALSLGLTPNFKSNFDLAEDAKLQLSKDTYDDDLDNLLAQIGDQYADLFLAAKNLSDAILLSDILRVNTEITKAPLSASMIKRYDEHHQDLTLLKALVRQQLPEKYKEIFFDQSKNGYAGYIDGGASQEEFYKFIKPILEKMDGTEELLVKLNREDLLRKQRTFDNGSIPHQIHLGELHAILRRQEDFYPFLKDNREKIEKILTFRIPYYVGPLARGNSRFAWMTRKSEETITPWNFEEVVDKGASAQSFIERMTNFDKNLPNEKVLPKHSLLYEYFTVYNELTKVKYVTEGMRKPAFLSGEQKKAIVDLLFKTNRKVTVKQLKEDYFKKIECFDSVEISGVEDRFNASLGTYHDLLKIIKDKDFLDNEENEDILEDIVLTLTLFEDREMIEERLKTYAHLFDDKVMKQLKRRRYTGWGRLSRKLINGIRDKQSGKTILDFLKSDGFANRNFMQLIHDDSLTFKEDIQKAQVSGQGDSLHEHIANLAGSPAIKKGILQTVKVVDELVKVMGRHKPENIVIEMARENQTTQKGQKNSRERMKRIEEGIKELGSQILKEHPVENTQLQNEKLYLYYLQNGRDMYVDQELDINRLSDYDVDAIVPQSFLKDDSIDNKVLTRSDKNRGKSDNVPSEEVVKKMKNYWRQLLNAKLITQRKFDNLTKAERGGLSELDKAGFIKRQLVETRQITKHVAQILDSRMNTKYDENDKLIREVKVITLKSKLVSDFRKDFQFYKVREINNYHHAHDAYLNAVVGTALIKKYPKLESEFVYGDYKVYDVRKMIAKSEQEIGKATAKYFFYSNIMNFFKTEITLANGEIRKRPLIETNGETGEIVWDKGRDFATVRKVLSMPQVNIVKKTEVQTGGFSKESILPKRNSDKLIARKKDWDPKKYGGFDSPTVAYSVLVVAKVEKGKSKKLKSVKELLGITIMERSSFEKNPIDFLEAKGYKEVKKDLIIKLPKYSLFELENGRKRMLASAGELQKGNELALPSKYVNFLYLASHYEKLKGSPEDNEQKQLFVEQHKHYLDEIIEQISEFSKRVILADANLDKVLSAYNKHRDKPIREQAENIIHLFTLTNLGAPAAFKYFDTTIDRKRYTSTKEVLDATLIHQSITGLYETRIDLSQLGGDPKKKRKV

SEQ ID NO: 1134 - protein, 2818 aa, synthetic construct
  REGION 1..2818: note = Description of Artificial Sequence: Synthetic polypeptide
MELTPELSGVSTDLGGGGSIFAHWRMKEESPAPTEILDDLNVLEWEKTTRDYSKEDLRIADQLFSIEDEHQSLPFETADAEDGTPTEEEEEKELPMRTLDNFVLYDASDLELAALDLIGTELNIHAVGTVGPIYTEGEEDEQEDEDEDVSPPVRTGTQATSASVTQMTVELYIRNIVQYEFCFNDDGTVETWIQTTNAHYKLLQPAKCYTSLYRPVNDCLNVITAIITLAPESTTMSLKDLLKVMDDKAQAVSYEEVERMSEFIVQHLDQWMETAPKKKSKLIEKSKVYIDLNNLAGIDMVSGVRPPPVRRVTGRSSAPKKRIVRNMNDAVLLHQNETTVTNWIHQLSAGMFGRALNVLGAETADVENLTCDPASAKFVVPQRRLHKRLKWETRGHIPVSEEEYKHIYQGKKYAKFFEAVRAVDESKLTIKLGDLVYVLDQDPKVTQTQFATAGREGRKKGAEKEKIQVRFGRVLSIRQPDSNSKDAQNVFIHVQWLVLGCDTILQEMASRRELFLTDSCDTVFADVIYGVAKLTPLGAKDIPTVEFHESMATMMGENEFFVRFKYNYQDGSFTDLKDVDAEQIGTLQPRVNTHRNPGYCSNCRIKYDNERTGDKWIYENDTEGEPRLFRSSKGWCIYAQEFVYLQPVEKQPGTTFRVGYISEINKSSVIVELLARVDDDDKSGHISYSDPRHLYFTGTDIKVTFDKIIRKCFVFHDSGDQKAKAPLMYGTLQRDLYYYRYEKRKGKAELVPVREIRSIHEQTLNDWESRTQIERHGAVSGKKLKGLDIFAGCGGLTLGLDLSGAVDTKWDIEFAPSAANTLALNFPDAQVFNQCANVLLSRAIQSEDEGSLDIEYDLQGRVLPDLPKKGEVDFIYGGPPCQGFSGVNRYKKGNDIKNSLVATFLSYVDHYKPRFVLLENVKGLITTKLGNSKNAEGKWEGGISNGVVKFIYRTLISMNYQCRIGLVQSGEYGVPQSRPRVIFLAARMGERLPDLPEPMHAFEVLDSQYALPHIKRYHTTQNGVAPLPRITIGEAVSDLPKFQYANPGVWPRHDPYSSAKAQPSDKTIEKFSVSKATSFVGYLLQPYHSRPQSEFQRRLRTKLVPSDEPAEKTSLLTTKLVTAHVTRLFNKETTQRIVCVPMWPGADHRSLPKEMRPWCLVDPNSQAEKHRFWPGLFGRLGMEDFFSTALTDVQPCGKQGKVLHPTQRRVYTVRELARAQGFPDWFAFTDGDADSGLGGVKKWHRNIGNAVPVPLGEQIGRCIGYSVWWKDDMIAQLREDGADEDEEMIDGNDQWVEELNTQMAADMPGLPLLVTHLLNLCVYRRLYGPNAKEFLPARVYDKKLEGGRRRLVWAMLGGPSSGAPPPSGGSPAGSPTSTEEGTSESATPESGPGTSTEPSEGSAPGSPAGSPTSTEEGTSTEPSEGSAPGTSTEPSEPKKKRKVMDKKYSIGLAIGTNSVGWAVITDEYKVPSKKFKVLGNTDRHSIKKNLIGALLFDSGETAEATRLKRTARRRYTRRKNRICYLQEIFSNEMAKVDDSFFHRLEESFLVEEDKKHERHPIFGNIVDEVAYHEKYPTIYHLRKKLVDSTDKADLRLIYLALAHMIKFRGHFLIEGDLNPDNSDVDKLFIQLVQTYNQLFEENPINASGVDAKAILSARLSKSRRLENLIAQLPGEKKNGLFGNLIALSLGLTPNFKSNFDLAEDAKLQLSKDTYDDDLDNLLAQIGDQYADLFLAAKNLSDAILLSDILRVNTEITKAPLSASMIKRYDEHHQDLTLLKALVRQQLPEKYKEIFFDQSKNGYAGYIDGGASQEEFYKFIKPILEKMDGTEELLVKLNREDLLRKQRTFDNGSIPHQIHLGELHAILRRQEDFYPFLKDNREKIEKILTFRIPYYVGPLARGNSRFAWMTRKSEETITPWNFEEVVDKGASAQSFIERMTNFDKNLPNEKVLPKHSLLYEYFTVYNELTKVKYVTEGMRKPAFLSGEQKKAIVDLLFKTNRKVTVKQLKEDYFKKIECFDSVEISGVEDRFNASLGTYHDLLKIIKDKDFLDNEENEDILEDIVLTLTLFEDREMIEERLKTYAHLFDDKVMKQLKRRRYTGWGRLSRKLINGIRDKQSGKTILDFLKSDGFANRNFMQLIHDDSLTFKEDIQKAQVSGQGDSLHEHIANLAGSPAIKKGILQTVKVVDELVKVMGRHKPENIVIEMARENQTTQKGQKNSRERMKRIEEGIKELGSQILKEHPVENTQLQNEKLYLYYLQNGRDMYVDQELDINRLSDYDVDAIVPQSFLKDDSIDNKVLTRSDKNRGKSDNVPSEEVVKKMKNYWRQLLNAKLITQRKFDNLTKAERGGLSELDKAGFIKRQLVETRQITKHVAQILDSRMNTKYDENDKLIREVKVITLKSKLVSDFRKDFQFYKVREINNYHHAHDAYLNAVVGTALIKKYPKLESEFVYGDYKVYDVRKMIAKSEQEIGKATAKYFFYSNIMNFFKTEITLANGEIRKRPLIETNGETGEIVWDKGRDFATVRKVLSMPQVNIVKKTEVQTGGFSKESILPKRNSDKLIARKKDWDPKKYGGFDSPTVAYSVLVVAKVEKGKSKKLKSVKELLGITIMERSSFEKNPIDFLEAKGYKEVKKDLIIKLPKYSLFELENGRKRMLASAGELQKGNELALPSKYVNFLYLASHYEKLKGSPEDNEQKQLFVEQHKHYLDEIIEQISEFSKRVILADANLDKVLSAYNKHRDKPIREQAENIIHLFTLTNLGAPAAFKYFDTTIDRKRYTSTKEVLDATLIHQSITGLYETRIDLSQLGGDPKKKRKV

SEQ ID NO: 1135 - protein, 2798 aa, synthetic construct
  REGION 1..2798: note = Description of Artificial Sequence: Synthetic polypeptide
MELTPELSGVSTDLGGGGSIFAHWRMKEESPAPTEILDDLNVLEWEKTTRDYSKEDLRIADQLFSIEDEHQSLPFETADAEDGTPTEEEEEKELPMRTLDNFVLYDASDLELAALDLIGTELNIHAVGTVGPIYTEGEEDEQEDEDEDVSPPVRTGTQATSASVTQMTVELYIRNIVQYEFCFNDDGTVETWIQTTNAHYKLLQPAKCYTSLYRPVNDCLNVITAIITLAPESTTMSLKDLLKVMDDKAQAVSYEEVERMSEFIVQHLDQWMETAPKKKSKLIEKSKVYIDLNNLAGIDMVSGVRPPPVRRVTGRSSAPKKRIVRNMNDAVLLHQNETTVTNWIHQLSAGMFGRALNVLGAETADVENLTCDPASAKFVVPQRRLHKRLKWETRGHIPVSEEEYKHIYQGKKYAKFFEAVRAVDESKLTIKLGDLVYVLDQDPKVTQTQFATAGREGRKKGAEKEKIQVRFGRVLSIRQPDSNSKDAQNVFIHVQWLVLGCDTILQEMASRRELFLTDSCDTVFADVIYGVAKLTPLGAKDIPTVEFHESMATMMGENEFFVRFKYNYQDGSFTDLKDVDAEQIGTPQPRVNTHRNPGYCSNCRIKYDNERTGDKWIYENDTEGEPRLFRSSKGWCIYAQEFVYLQPVEKQPGTTFRVGYISEINKSSVIVELLARVDDDDKSGHISYSDPRHLYFTGTDIKVTFDKIIRKCFVFHDSGDQKAKAALMYGTLQRDLYYYRYEKRKGKAELVPVREIRSIHEQTLNDWESRTQIERHGAVSGKKLKGLDIFAGCGGLTLGLDLSGAVDTKWAIEFAPSAANTLALNFPDAQVFNQCANVLLSRAIQSEDEGSLDIEYDLQGRVLPDLPKKGEVDFIYGGPPCQGFSGVNRYKKGNDIKNSLVATFLSYVDHYKPRFVLLENVKGLITTKLGNSKNAEGKWEGGISNGVVKFIYRTLISMNYQCRIGLVQSGEYGVPQSRPRVIFLAARMGERLPDLPEPMHAFEVLDSQYALPHIKRYHTTQNGVAPLPRITIGEAVSDLPKFQYANPGVWPRHDPYSSAKAQPSDKTIEKFSVSKATSFVGYLLQPYHSRPQSEFQRRLRTKLVPSDDPAEEPSLLTTKLVTAHVTRLFNKETTQRIVCVPMWPGADHRSLPKEMRPWCLVDPNSQAEKHRFWPGLFGRLGMEDFFSTALTDVQPCGKQGKVLHPTPRRVYTVRELARAQGFPDWFAFTDDDADSGLGGVKEWHRNIGNAVPVPLGEQIGRCIGYSVWWKDDMIAQLREDGADEDEEMIDGNDQWVEELNTQMAADMPGNAKEFLPARVYDKKLEGGRRRLVWAMLGGPSSGAPPPSGGSPAGSPTSTEEGTSESATPESGPGTSTEPSEGSAPGSPAGSPTSTEEGTSTEPSEGSAPGTSTEPSEPKKKRKVMDKKYSIGLAIGTNSVGWAVITDEYKVPSKKFKVLGNTDRHSIKKNLIGALLFDSGETAEATRLKRTARRRYTRRKNRICYLQEIFSNEMAKVDDSFFHRLEESFLVEEDKKHERHPIFGNIVDEVAYHEKYPTIYHLRKKLVDSTDKADLRLIYLALAHMIKFRGHFLIEGDLNPDNSDVDKLFIQLVQTYNQLFEENPINASGVDAKAILSARLSKSRRLENLIAQLPGEKKNGLFGNLIALSLGLTPNFKSNFDLAEDAKLQLSKDTYDDDLDNLLAQIGDQYADLFLAAKNLSDAILLSDILRVNTEITKAPLSASMIKRYDEHHQDLTLLKALVRQQLPEKYKEIFFDQSKNGYAGYIDGGASQEEFYKFIKPILEKMDGTEELLVKLNREDLLRKQRTFDNGSIPHQIHLGELHAILRRQEDFYPFLKDNREKIEKILTFRIPYYVGPLARGNSRFAWMTRKSEETITPWNFEEVVDKGASAQSFIERMTNFDKNLPNEKVLPKHSLLYEYFTVYNELTKVKYVTEGMRKPAFLSGEQKKAIVDLLFKTNRKVTVKQLKEDYFKKIECFDSVEISGVEDRFNASLGTYHDLLKIIKDKDFLDNEENEDILEDIVLTLTLFEDREMIEERLKTYAHLFDDKVMKQLKRRRYTGWGRLSRKLINGIRDKQSGKTILDFLKSDGFANRNFMQLIHDDSLTFKEDIQKAQVSGQGDSLHEHIANLAGSPAIKKGILQTVKVVDELVKVMGRHKPENIVIEMARENQTTQKGQKNSRERMKRIEEGIKELGSQILKEHPVENTQLQNEKLYLYYLQNGRDMYVDQELDINRLSDYDVDAIVPQSFLKDDSIDNKVLTRSDKNRGKSDNVPSEEVVKKMKNYWRQLLNAKLITQRKFDNLTKAERGGLSELDKAGFIKRQLVETRQITKHVAQILDSRMNTKYDENDKLIREVKVITLKSKLVSDFRKDFQFYKVREINNYHHAHDAYLNAVVGTALIKKYPKLESEFVYGDYKVYDVRKMIAKSEQEIGKATAKYFFYSNIMNFFKTEITLANGEIRKRPLIETNGETGEIVWDKGRDFATVRKVLSMPQVNIVKKTEVQTGGFSKESILPKRNSDKLIARKKDWDPKKYGGFDSPTVAYSVLVVAKVEKGKSKKLKSVKELLGITIMERSSFEKNPIDFLEAKGYKEVKKDLIIKLPKYSLFELENGRKRMLASAGELQKGNELALPSKYVNFLYLASHYEKLKGSPEDNEQKQLFVEQHKHYLDEIIEQISEFSKRVILADANLDKVLSAYNKHRDKPIREQAENIIHLFTLTNLGAPAAFKYFDTTIDRKRYTSTKEVLDATLIHQSITGLYETRIDLSQLGGDPKKKRKV

SEQ ID NO: 1136 - protein, 2996 aa, synthetic construct
  REGION 1..2996: note = Description of Artificial Sequence: Synthetic polypeptide
MVENGAKAAKRKKRPLPEIQEVEDVPRTRRPRRAAACTSFKEKSIRVCEKSATIEVKKQQIVEEEFLALRLTALETDVEDRPTRRLNDFVLFDSDGVPQPLEMLEIHDIFVSGAILPSDVCTDKEKEKGVRCTSFGRVEHWSISGYEDGSPVIWISTELADYDCRKPAASYRKVYDYFYEKARASVAVYKKLSKSSGGDPDIGLEELLAAVVRSMSSGSKYFSSGAAIIDFVISQGDFIYNQLAGLDETAKKHESSYVEIPVLVALREKSSKIDKPLQRERNPSNGVRIKEVSQVAESEALTSDQLVDGTDDDRRYAILLQDEENRKSMQQPRKNSSSGSASNMFYIKINEDEIANDYPLPSYYKTSEEETDELILYDASYEVQSEHLPHRMLHNWALYNSDLRFISLELLPMKQCDDIDVNIFGSGVVTDDNGSWISLNDPDSGSQSHDPDGMCIFLSQIKEWMIEFGSDDIISISIRTDVAWYRLGKPSKLYAPWWKPVLKTARVGISILTFLRVESRVARLSFADVTKRLSGLQANDKAYISSDPLAVERYLVVHGQIILQLFAVYPDDNVKRCPFVVGLASKLEDRHHTKWIIKKKKISLKELNLNPRAGMAPVASKRKAMQATTTRLVNRIWGEFYSNYSPEDPLQATAAENGEDEVEEEGGNGEEEVEEEGENGLTEDTVPEPVEVQKPHTPKKIRGSSGKREIKWDGESLGKTSAGEPLYQQALVGGEMVAVGGAVTLEVDDPDEMPAIYFVEYMFESTDHCKMLHGRFLQRGSMTVLGNAANERELFLTNECMTTQLKDIKGVASFEIRSRPWGHQYRKKNITADKLDWARALERKVKDLPTEYYCKSLYSPERGGFFSLPLSDIGRSSGFCTSCKIREDEEKRSTIKLNVSKTGFFINGIEYSVEDFVYVNPDSIGGLKEGSKTSFKSGRNIGLRAYVVCQLLEIVPKESRKADLGSFDVKVRRFYRPEDVSAEKAYASDIQELYFSQDTVVLPPGALEGKCEVRKKSDMPLSREYPISDHIFFCDLFFDTSKGSLKQLPANMKPKFSTIKDDTLLRKKKGKGVESEIESEIVKPVEPPKEIRLATLDIFAGCGGLSHGLKKAGVSDAKWAIEYEEPAGQAFKQNHPESTVFVDNCNVILRAIMEKGGDQDDCVSTTEANELAAKLTEEQKSTLPLPGQVDFINGGPPCQGFSGMNRFNQSSWSKVQCEMILAFLSFADYFRPRYFLLENVRTFVSFNKGQTFQLTLASLLEMGYQVRFGILEAGAYGVSQSRKRAFIWAAAPEEVLPEWPEPMHVFGVPKLKISLSQGLHYAAVRSTALGAPFRPITVRDTIGDLPSVENGDSRTNKEYKEVAVSWFQKEIRGNTIALTDHICKAMNELNLIRCKLIPTRPGADWHDLPKRKVTLSDGRVEEMIPFCLPNTAERHNGWKGLYGRLDWQGNFPTSVTDPQPMGKVGMCFHPEQHRILTVRECARSQGFPDSYEFAGNINHKHRQIGNAVPPPLAFALGRKLKEALHLKKSPQHQPGGPSSGAPPPSGGSPAGSPTSTEEGTSESATPESGPGTSTEPSEGSAPGSPAGSPTSTEEGTSTEPSEGSAPGTSTEPSEPKKKRKVMDKKYSIGLAIGTNSVGWAVITDEYKVPSKKFKVLGNTDRHSIKKNLIGALLFDSGETAEATRLKRTARRRYTRRKNRICYLQEIFSNEMAKVDDSFFHRLEESFLVEEDKKHERHPIFGNIVDEVAYHEKYPTIYHLRKKLVDSTDKADLRLIYLALAHMIKFRGHFLIEGDLNPDNSDVDKLFIQLVQTYNQLFEENPINASGVDAKAILSARLSKSRRLENLIAQLPGEKKNGLFGNLIALSLGLTPNFKSNFDLAEDAKLQLSKDTYDDDLDNLLAQIGDQYADLFLAAKNLSDAILLSDILRVNTEITKAPLSASMIKRYDEHHQDLTLLKALVRQQLPEKYKEIFFDQSKNGYAGYIDGGASQEEFYKFIKPILEKMDGTEELLVKLNREDLLRKQRTFDNGSIPHQIHLGELHAILRRQEDFYPFLKDNREKIEKILTFRIPYYVGPLARGNSRFAWMTRKSEETITPWNFEEVVDKGASAQSFIERMTNFDKNLPNEKVLPKHSLLYEYFTVYNELTKVKYVTEGMRKPAFLSGEQKKAIVDLLFKTNRKVTVKQLKEDYFKKIECFDSVEISGVEDRFNASLGTYHDLLKIIKDKDFLDNEENEDILEDIVLTLTLFEDREMIEERLKTYAHLFDDKVMKQLKRRRYTGWGRLSRKLINGIRDKQSGKTILDFLKSDGFANRNFMQLIHDDSLTFKEDIQKAQVSGQGDSLHEHIANLAGSPAIKKGILQTVKVVDELVKVMGRHKPENIVIEMARENQTTQKGQKNSRERMKRIEEGIKELGSQILKEHPVENTQLQNEKLYLYYLQNGRDMYVDQELDINRLSDYDVDAIVPQSFLKDDSIDNKVLTRSDKNRGKSDNVPSEEVVKKMKNYWRQLLNAKLITQRKFDNLTKAERGGLSELDKAGFIKRQLVETRQITKHVAQILDSRMNTKYDENDKLIREVKVITLKSKLVSDFRKDFQFYKVREINNYHHAHDAYLNAVVGTALIKKYPKLESEFVYGDYKVYDVRKMIAKSEQEIGKATAKYFFYSNIMNFFKTEITLANGEIRKRPLIETNGETGEIVWDKGRDFATVRKVLSMPQVNIVKKTEVQTGGFSKESILPKRNSDKLIARKKDWDPKKYGGFDSPTVAYSVLVVAKVEKGKSKKLKSVKELLGITIMERSSFEKNPIDFLEAKGYKEVKKDLIIKLPKYSLFELENGRKRMLASAGELQKGNELALPSKYVNFLYLASHYEKLKGSPEDNEQKQLFVEQHKHYLDEIIEQISEFSKRVILADANLDKVLSAYNKHRDKPIREQAENIIHLFTLTNLGAPAAFKYFDTTIDRKRYTSTKEVLDATLIHQSITGLYETRIDLSQLGGDPKKKRKV

SEQ ID NO: 1137 - protein, 2916 aa, synthetic construct
  REGION 1..2916: note = Description of Artificial Sequence: Synthetic polypeptide
MDSPDRSHGGMFIDVPAETMGFQEDYLDMFASVLSQGLAKEGDYAHHQPLPAGKEECLEPIAVATTITPSPDDPQLQLQLELEQQFQTESGLNGVDPAPAPESEDEADLPDGFSDESPDDDFVVQRSKHITVDLPVSTLINPRSTFQRIDENDNLVPPPQSTPERVAVEDLLKAAKAAGKNKEDYIEFELHDFNFYVNYAYHPQEMRPIQLVATKVLHDKYYFDGVLKYGNTKHYVTGMQVLELPVGNYGASLHSVKGQIWVRSKHNAKKEIYYLLKKPAFEYQRYYQPFLWIADLGKHVVDYCTRMVERKREVTLGCFKSDFIQWASKAHGKSKAFQNWRAQHPSDDFRTSVAANIGYIWKEINGVAGAKRAAGDQLFRELMIVKPGQYFRQEVPPGPVVTEGDRTVAATIVTPYIKECFGHMILGKVLRLAGEDAEKEKEVKLAKRLKIENKNATKADTKDDMKNDTATESLPTPLRSLPVQVLEATPIESDIVSIVSSDLPPSENNPPPLTNGSVKPKAKANPKPKPSTQPLHAAHVKYLSQELVNKIKVGDVISTPRDDSSNTDTKWKPTDTDDHRWFGLVQRVHTAKTKSSGRGLNSKSFDVIWFYRPEDTPCCAMKYKWRNELFLSNHCTCQEGHHARVKGNEVLAVHPVDWFGTPESNKGEFFVRQLYESEQRRWITLQKDHLTCYHNQPPKPPTAPYKPGDTVLATLSPSDKFSDPYEVVEYFTQGEKETAFVRLRKLLRRRKVDRQDAPANELVYTEDLVDVRAERIVGKCIMRCFRPDERVPSPYDRGGTGNMFFITHRQDHGRCVPLDTLPPTLRQGFNPLGNLGKPKLRGMDLYCGGGNFGRGLEEGGVVEMRWANDIWDKAIHTYMANTPDPNKTNPFLGSVDDLLRLALEGKFSDNVPRPGEVDFIAAGSPCPGFSLLTQDKKVLNQVKNQSLVASFASFVDFYRPKYGVLENVSGIVQTFVNRKQDVLSQLFCALVGMGYQAQLILGDAWAHGAPQSRERVFLYFAAPGLPLPDPPLPSHSHYRVKNRNIGFLCNGESYVQRSFIPTAFKFVSAGEGTADLPKIGDGKPDACVRFPDHRLASGITPYIRAQYACIPTHPYGMNFIKAWNNGNGVMSKSDRDLFPSEGKTRTSDASVGWKRLNPKTLFPTVTTTSNPSDARMGPGLHWDEDRPYTVQEMRRAQGYLDEEVLVGRTTDQWKLVGNSVSRHMALAIGLKFREAWLGTLYDESAVVATATATATTAAAVGVTVPVMEEPGIGTTESSRPSRSPVHTAVDLDDSKSERSRSTTPATVLSTSSAAGDGSANAAGLEDDDNDDMEMMEVTRKRSSPAVDEEGMRPSKVQKVEVTVASPASRRSSRQASRNPTASPSSKASKATTHEAPAPEELESDAESYSETYDKEGFDGDYHSGHEDQYSEEDEEEEYAEPETMTVNGMTIVKLGGPSSGAPPPSGGSPAGSPTSTEEGTSESATPESGPGTSTEPSEGSAPGSPAGSPTSTEEGTSTEPSEGSAPGTSTEPSEPKKKRKVMDKKYSIGLAIGTNSVGWAVITDEYKVPSKKFKVLGNTDRHSIKKNLIGALLFDSGETAEATRLKRTARRRYTRRKNRICYLQEIFSNEMAKVDDSFFHRLEESFLVEEDKKHERHPIFGNIVDEVAYHEKYPTIYHLRKKLVDSTDKADLRLIYLALAHMIKFRGHFLIEGDLNPDNSDVDKLFIQLVQTYNQLFEENPINASGVDAKAILSARLSKSRRLENLIAQLPGEKKNGLFGNLIALSLGLTPNFKSNFDLAEDAKLQLSKDTYDDDLDNLLAQIGDQYADLFLAAKNLSDAILLSDILRVNTEITKAPLSASMIKRYDEHHQDLTLLKALVRQQLPEKYKEIFFDQSKNGYAGYIDGGASQEEFYKFIKPILEKMDGTEELLVKLNREDLLRKQRTFDNGSIPHQIHLGELHAILRRQEDFYPFLKDNREKIEKILTFRIPYYVGPLARGNSRFAWMTRKSEETITPWNFEEVVDKGASAQSFIERMTNFDKNLPNEKVLPKHSLLYEYFTVYNELTKVKYVTEGMRKPAFLSGEQKKAIVDLLFKTNRKVTVKQLKEDYFKKIECFDSVEISGVEDRFNASLGTYHDLLKIIKDKDFLDNEENEDILEDIVLTLTLFEDREMIEERLKTYAHLFDDKVMKQLKRRRYTGWGRLSRKLINGIRDKQSGKTILDFLKSDGFANRNFMQLIHDDSLTFKEDIQKAQVSGQGDSLHEHIANLAGSPAIKKGILQTVKVVDELVKVMGRHKPENIVIEMARENQTTQKGQKNSRERMKRIEEGIKELGSQILKEHPVENTQLQNEKLYLYYLQNGRDMYVDQELDINRLSDYDVDAIVPQSFLKDDSIDNKVLTRSDKNRGKSDNVPSEEVVKKMKNYWRQLLNAKLITQRKFDNLTKAERGGLSELDKAGFIKRQLVETRQITKHVAQILDSRMNTKYDENDKLIREVKVITLKSKLVSDFRKDFQFYKVREINNYHHAHDAYLNAVVGTALIKKYPKLESEFVYGDYKVYDVRKMIAKSEQEIGKATAKYFFYSNIMNFFKTEITLANGEIRKRPLIETNGETGEIVWDKGRDFATVRKVLSMPQVNIVKKTEVQTGGFSKESILPKRNSDKLIARKKDWDPKKYGGFDSPTVAYSVLVVAKVEKGKSKKLKSVKELLGITIMERSSFEKNPIDFLEAKGYKEVKKDLIIKLPKYSLFELENGRKRMLASAGELQKGNELALPSKYVNFLYLASHYEKLKGSPEDNEQKQLFVEQHKHYLDEIIEQISEFSKRVILADANLDKVLSAYNKHRDKPIREQAENIIHLFTLTNLGAPAAFKYFDTTIDRKRYTSTKEVLDATLIHQSITGLYETRIDLSQLGGDPKKKRKV

SEQ ID NO: 1138 - protein, 2078 aa, synthetic construct
  REGION 1..2078: note = Description of Artificial Sequence: Synthetic polypeptide
MLRGMDLYCGGGNFGRGLEEGGVVEMRWANDIWDKAIHTYMANTPDPNKTNPFLGSVDDLLRLALEGKFSDNVPRPGEVDFIAAGSPCPGFSLLTQDKKVLNQVKNQSLVASFASFVDFYRPKYGVLENVSGIVQTFVNRKQDVLSQLFCALVGMGYQAQLILGDAWAHGAPQSRERVFLYFAAPGLPLPDPPLPSHSHYRVKNRNIGFLCNGESYVQRSFIPTAFKFVSAGEGTADLPKIGDGKPDACVRFPDHRLASGITPYIRAQYACIPTHPYGMNFIKAWNNGNGVMSKSDRDLFPSEGKTRTSDASVGWKRLNPKTLFPTVTTTSNPSDARMGPGLHWDEDRPYTVQEMRRAQGYLDEEVLVGRTTDQWKLVGNSVSRHMALAIGLKFREAWLGTLYDESAVVATATATATTAAAVGVTVPVMEEPGIGTTESSRPSRSPVHTAVDLDDSKSERSRSTTPATVLSTSSAAGDGSANAAGLEDDDNDDMEMMEVTRKRSSPAVDEEGMRPSKVQKVEVTVASPASRRSSRQASRNPTASPSSKASKATTHEAPAPEELESDAESYSETYDKEGFDGDYHSGHEDQYSEEDEEEEYAEPETMTVNGMTIVKLGGPSSGAPPPSGGSPAGSPTSTEEGTSESATPESGPGTSTEPSEGSAPGSPAGSPTSTEEGTSTEPSEGSAPGTSTEPSEPKKKRKVMDKKYSIGLAIGTNSVGWAVITDEYKVPSKKFKVLGNTDRHSIKKNLIGALLFDSGETAEATRLKRTARRRYTRRKNRICYLQEIFSNEMAKVDDSFFHRLEESFLVEEDKKHERHPIFGNIVDEVAYHEKYPTIYHLRKKLVDSTDKADLRLIYLALAHMIKFRGHFLIEGDLNPDNSDVDKLFIQLVQTYNQLFEENPINASGVDAKAILSARLSKSRRLENLIAQLPGEKKNGLFGNLIALSLGLTPNFKSNFDLAEDAKLQLSKDTYDDDLDNLLAQIGDQYADLFLAAKNLSDAILLSDILRVNTEITKAPLSASMIKRYDEHHQDLTLLKALVRQQLPEKYKEIFFDQSKNGYAGYIDGGASQEEFYKFIKPILEKMDGTEELLVKLNREDLLRKQRTFDNGSIPHQIHLGELHAILRRQEDFYPFLKDNREKIEKILTFRIPYYVGPLARGNSRFAWMTRKSEETITPWNFEEVVDKGASAQSFIERMTNFDKNLPNEKVLPKHSLLYEYFTVYNELTKVKYVTEGMRKPAFLSGEQKKAIVDLLFKTNRKVTVKQLKEDYFKKIECFDSVEISGVEDRFNASLGTYHDLLKIIKDKDFLDNEENEDILEDIVLTLTLFEDREMIEERLKTYAHLFDDKVMKQLKRRRYTGWGRLSRKLINGIRDKQSGKTILDFLKSDGFANRNFMQLIHDDSLTFKEDIQKAQVSGQGDSLHEHIANLAGSPAIKKGILQTVKVVDELVKVMGRHKPENIVIEMARENQTTQKGQKNSRERMKRIEEGIKELGSQILKEHPVENTQLQNEKLYLYYLQNGRDMYVDQELDINRLSDYDVDAIVPQSFLKDDSIDNKVLTRSDKNRGKSDNVPSEEVVKKMKNYWRQLLNAKLITQRKFDNLTKAERGGLSELDKAGFIKRQLVETRQITKHVAQILDSRMNTKYDENDKLIREVKVITLKSKLVSDFRKDFQFYKVREINNYHHAHDAYLNAVVGTALIKKYPKLESEFVYGDYKVYDVRKMIAKSEQEIGKATAKYFFYSNIMNFFKTEITLANGEIRKRPLIETNGETGEIVWDKGRDFATVRKVLSMPQVNIVKKTEVQTGGFSKESILPKRNSDKLIARKKDWDPKKYGGFDSPTVAYSVLVVAKVEKGKSKKLKSVKELLGITIMERSSFEKNPIDFLEAKGYKEVKKDLIIKLPKYSLFELENGRKRMLASAGELQKGNELALPSKYVNFLYLASHYEKLKGSPEDNEQKQLFVEQHKHYLDEIIEQISEFSKRVILADANLDKVLSAYNKHRDKPIREQAENIIHLFTLTNLGAPAAFKYFDTTIDRKRYTSTKEVLDATLIHQSITGLYETRIDLSQLGGDPKKKRKV

SEQ ID NO: 1139 - protein, 1807 aa, synthetic construct
  REGION 1..1807: note = Description of Artificial Sequence: Synthetic polypeptide
MVFRVLELFSGIGGMHYAFNYAQLDGQIVAALDVNTVANAVYAHNYGSNLVKTRNIQSLSVKEVTKLQANMLLMSPPCQPHTRQGLQRDTEDKRSDALTHLCGLIPECQELEYILMENVKGFESSQARNQFIESLERSGFHWREFILTPTQFNVPNTRYRYYCIARKGADFPFAGGKIWEEMPGAIAQNQGLSQIAEIVEENVSPDFLVPDDVLTKRVLVMDIIHPAQSRSMCFTKGYTHYTEGTGSAYTPLSEDESHRIFELVKEIDTSNQDASKSEKILQQRLDLLHQVRLRYFTPREVARLMSFPENFEFPPETTNRQKYRLLGNSINVKVVGELIKLLTIKGGPSSGAPPPSGGSPAGSPTSTEEGTSESATPESGPGTSTEPSEGSAPGSPAGSPTSTEEGTSTEPSEGSAPGTSTEPSEPKKKRKVMDKKYSIGLAIGTNSVGWAVITDEYKVPSKKFKVLGNTDRHSIKKNLIGALLFDSGETAEATRLKRTARRRYTRRKNRICYLQEIFSNEMAKVDDSFFHRLEESFLVEEDKKHERHPIFGNIVDEVAYHEKYPTIYHLRKKLVDSTDKADLRLIYLALAHMIKFRGHFLIEGDLNPDNSDVDKLFIQLVQTYNQLFEENPINASGVDAKAILSARLSKSRRLENLIAQLPGEKKNGLFGNLIALSLGLTPNFKSNFDLAEDAKLQLSKDTYDDDLDNLLAQIGDQYADLFLAAKNLSDAILLSDILRVNTEITKAPLSASMIKRYDEHHQDLTLLKALVRQQLPEKYKEIFFDQSKNGYAGYIDGGASQEEFYKFIKPILEKMDGTEELLVKLNREDLLRKQRTFDNGSIPHQIHLGELHAILRRQEDFYPFLKDNREKIEKILTFRIPYYVGPLARGNSRFAWMTRKSEETITPWNFEEVVDKGASAQSFIERMTNFDKNLPNEKVLPKHSLLYEYFTVYNELTKVKYVTEGMRKPAFLSGEQKKAIVDLLFKTNRKVTVKQLKEDYFKKIECFDSVEISGVEDRFNASLGTYHDLLKIIKDKDFLDNEENEDILEDIVLTLTLFEDREMIEERLKTYAHLFDDKVMKQLKRRRYTGWGRLSRKLINGIRDKQSGKTILDFLKSDGFANRNFMQLIHDDSLTFKEDIQKAQVSGQGDSLHEHIANLAGSPAIKKGILQTVKVVDELVKVMGRHKPENIVIEMARENQTTQKGQKNSRERMKRIEEGIKELGSQILKEHPVENTQLQNEKLYLYYLQNGRDMYVDQELDINRLSDYDVDAIVPQSFLKDDSIDNKVLTRSDKNRGKSDNVPSEEVVKKMKNYWRQLLNAKLITQRKFDNLTKAERGGLSELDKAGFIKRQLVETRQITKHVAQILDSRMNTKYDENDKLIREVKVITLKSKLVSDFRKDFQFYKVREINNYHHAHDAYLNAVVGTALIKKYPKLESEFVYGDYKVYDVRKMIAKSEQEIGKATAKYFFYSNIMNFFKTEITLANGEIRKRPLIETNGETGEIVWDKGRDFATVRKVLSMPQVNIVKKTEVQTGGFSKESILPKRNSDKLIARKKDWDPKKYGGFDSPTVAYSVLVVAKVEKGKSKKLKSVKELLGITIMERSSFEKNPIDFLEAKGYKEVKKDLIIKLPKYSLFELENGRKRMLASAGELQKGNELALPSKYVNFLYLASHYEKLKGSPEDNEQKQLFVEQHKHYLDEIIEQISEFSKRVILADANLDKVLSAYNKHRDKPIREQAENIIHLFTLTNLGAPAAFKYFDTTIDRKRYTSTKEVLDATLIHQSITGLYETRIDLSQLGGDPKKKRKV

SEQ ID NO: 1140 - protein, 1792 aa, synthetic construct
  REGION 1..1792: note = Description of Artificial Sequence: Synthetic polypeptide
MLSTKRLRVLELYSGIGGMHYALNLANIPADIVCAIDINPQANEIYNLNHGKLAKHMDISTLTAKDFDAFDCKLWTMSPSCQPFTRIGNRKDILDPRSQAFLNILNVLPHVNNLPEYILIENVQGFEESKAAEECRKVLRNCGYNLIEGILSPNQFNIPNSRSRWYGLARLNFKGEWSIDDVFQFSEVAQKEGEVKRIRDYLEIERDWSSYMVLESVLNKWGHQFDIVKPDSSSCCCFTRGYTHLVQGAGSILQMSDHENTHEQFERNRMALQLRYFTAREVARLMGFPESLEWSKSNVTEKCMYRLLGNSINVKVVSYLISLLLEPLNFGGPSSGAPPPSGGSPAGSPTSTEEGTSESATPESGPGTSTEPSEGSAPGSPAGSPTSTEEGTSTEPSEGSAPGTSTEPSEPKKKRKVMDKKYSIGLAIGTNSVGWAVITDEYKVPSKKFKVLGNTDRHSIKKNLIGALLFDSGETAEATRLKRTARRRYTRRKNRICYLQEIFSNEMAKVDDSFFHRLEESFLVEEDKKHERHPIFGNIVDEVAYHEKYPTIYHLRKKLVDSTDKADLRLIYLALAHMIKFRGHFLIEGDLNPDNSDVDKLFIQLVQTYNQLFEENPINASGVDAKAILSARLSKSRRLENLIAQLPGEKKNGLFGNLIALSLGLTPNFKSNFDLAEDAKLQLSKDTYDDDLDNLLAQIGDQYADLFLAAKNLSDAILLSDILRVNTEITKAPLSASMIKRYDEHHQDLTLLKALVRQQLPEKYKEIFFDQSKNGYAGYIDGGASQEEFYKFIKPILEKMDGTEELLVKLNREDLLRKQRTFDNGSIPHQIHLGELHAILRRQEDFYPFLKDNREKIEKILTFRIPYYVGPLARGNSRFAWMTRKSEETITPWNFEEVVDKGASAQSFIERMTNFDKNLPNEKVLPKHSLLYEYFTVYNELTKVKYVTEGMRKPAFLSGEQKKAIVDLLFKTNRKVTVKQLKEDYFKKIECFDSVEISGVEDRFNASLGTYHDLLKIIKDKDFLDNEENEDILEDIVLTLTLFEDREMIEERLKTYAHLFDDKVMKQLKRRRYTGWGRLSRKLINGIRDKQSGKTILDFLKSDGFANRNFMQLIHDDSLTFKEDIQKAQVSGQGDSLHEHIANLAGSPAIKKGILQTVKVVDELVKVMGRHKPENIVIEMARENQTTQKGQKNSRERMKRIEEGIKELGSQILKEHPVENTQLQNEKLYLYYLQNGRDMYVDQELDINRLSDYDVDAIVPQSFLKDDSIDNKVLTRSDKNRGKSDNVPSEEVVKKMKNYWRQLLNAKLITQRKFDNLTKAERGGLSELDKAGFIKRQLVETRQITKHVAQILDSRMNTKYDENDKLIREVKVITLKSKLVSDFRKDFQFYKVREINNYHHAHDAYLNAVVGTALIKKYPKLESEFVYGDYKVYDVRKMIAKSEQEIGKATAKYFFYSNIMNFFKTEITLANGEIRKRPLIETNGETGEIVWDKGRDFATVRKVLSMPQVNIVKKTEVQTGGFSKESILPKRNSDKLIARKKDWDPKKYGGFDSPTVAYSVLVVAKVEKGKSKKLKSVKELLGITIMERSSFEKNPIDFLEAKGYKEVKKDLIIKLPKYSLFELENGRKRMLASAGELQKGNELALPSKYVNFLYLASHYEKLKGSPEDNEQKQLFVEQHKHYLDEIIEQISEFSKRVILADANLDKVLSAYNKHRDKPIREQAENIIHLFTLTNLGAPAAFKYFDTTIDRKRYTSTKEVLDATLIHQSITGLYETRIDLSQLGGDPKKKRKV

SEQ ID NO: 1141 - protein, 2086 aa, synthetic construct
  REGION 1..2086: note = Description of Artificial Sequence: Synthetic polypeptide
MVMSHIFLISQIQEVEHGDSDDVNWNTDDDELAIDNFQFSPSPVHISATSPNSIQNRISDETVASFVEMGFSTQMIARAIEETAGANMEPMMILETLFNYSASTEASSSKSKVINHFIAMGFPEEHVIKAMQEHGDEDVGEITNALLTYAEVDKLRESEDMNININDDDDDNLYSLSSDDEEDELNNSSNEDRILQALIKMGYLREDAAIAIERCGEDASMEEVVDFICAAQMARQFDEIYAEPDKKELMNNNKKRRTYTETPRKPNTDQLISLPKEMIGFGVPNHPGLMMHRPVPIPDIARGPPFFYYENVAMTPKGVWAKISSHLYDIVPEFVDSKHFCAAARKRGYIHNLPIQNRFQIQPPQHNTIQEAFPLTKRWWPSWDGRTKLNCLLTCIASSRLTEKIREALERYDGETPLDVQKWVMYECKKWNLVWVGKNKLAPLDADEMEKLLGFPRDHTRGGGISTTDRYKSLGNSFQVDTVAYHLSVLKPLFPNGINVLSLFTGIGGGEVALHRLQIKMNVVVSVEISDANRNILRSFWEQTNQKGILREFKDVQKLDDNTIERLMDEYGGFDLVIGGSPCNNLAGGNRHHRVGLGGEHSSLFFDYCRILEAVRRKARHMRRGGPSSGAPPPSGGSPAGSPTSTEEGTSESATPESGPGTSTEPSEGSAPGSPAGSPTSTEEGTSTEPSEGSAPGTSTEPSEPKKKRKVMDKKYSIGLAIGTNSVGWAVITDEYKVPSKKFKVLGNTDRHSIKKNLIGALLFDSGETAEATRLKRTARRRYTRRKNRICYLQEIFSNEMAKVDDSFFHRLEESFLVEEDKKHERHPIFGNIVDEVAYHEKYPTIYHLRKKLVDSTDKADLRLIYLALAHMIKFRGHFLIEGDLNPDNSDVDKLFIQLVQTYNQLFEENPINASGVDAKAILSARLSKSRRLENLIAQLPGEKKNGLFGNLIALSLGLTPNFKSNFDLAEDAKLQLSKDTYDDDLDNLLAQIGDQYADLFLAAKNLSDAILLSDILRVNTEITKAPLSASMIKRYDEHHQDLTLLKALVRQQLPEKYKEIFFDQSKNGYAGYIDGGASQEEFYKFIKPILEKMDGTEELLVKLNREDLLRKQRTFDNGSIPHQIHLGELHAILRRQEDFYPFLKDNREKIEKILTFRIPYYVGPLARGNSRFAWMTRKSEETITPWNFEEVVDKGASAQSFIERMTNFDKNLPNEKVLPKHSLLYEYFTVYNELTKVKYVTEGMRKPAFLSGEQKKAIVDLLFKTNRKVTVKQLKEDYFKKIECFDSVEISGVEDRFNASLGTYHDLLKIIKDKDFLDNEENEDILEDIVLTLTLFEDREMIEERLKTYAHLFDDKVMKQLKRRRYTGWGRLSRKLINGIRDKQSGKTILDFLKSDGFANRNFMQLIHDDSLTFKEDIQKAQVSGQGDSLHEHIANLAGSPAIKKGILQTVKVVDELVKVMGRHKPENIVIEMARENQTTQKGQKNSRERMKRIEEGIKELGSQILKEHPVENTQLQNEKLYLYYLQNGRDMYVDQELDINRLSDYDVDAIVPQSFLKDDSIDNKVLTRSDKNRGKSDNVPSEEVVKKMKNYWRQLLNAKLITQRKFDNLTKAERGGLSELDKAGFIKRQLVETRQITKHVAQILDSRMNTKYDENDKLIREVKVITLKSKLVSDFRKDFQFYKVREINNYHHAHDAYLNAVVGTALIKKYPKLESEFVYGDYKVYDVRKMIAKSEQEIGKATAKYFFYSNIMNFFKTEITLANGEIRKRPLIETNGETGEIVWDKGRDFATVRKVLSMPQVNIVKKTEVQTGGFSKESILPKRNSDKLIARKKDWDPKKYGGFDSPTVAYSVLVVAKVEKGKSKKLKSVKELLGITIMERSSFEKNPIDFLEAKGYKEVKKDLIIKLPKYSLFELENGRKRMLASAGELQKGNELALPSKYVNFLYLASHYEKLKGSPEDNEQKQLFVEQHKHYLDEIIEQISEFSKRVILADANLDKVLSAYNKHRDKPIREQAENIIHLFTLTNLGAPAAFKYFDTTIDRKRYTSTKEVLDATLIHQSITGLYETRIDLSQLGGDPKKKRKV

SEQ ID NO: 1142 - protein, 2088 aa, synthetic construct
  REGION 1..2088: note = Description of Artificial Sequence: Synthetic polypeptide
MVIWNNDDDDFLEIDNFQSSPRSSPIHAMQCRVENLAGVAVTTSSLSSPTETTDLVQMGFSDEVFATLFDMGFPVEMISRAIKETGPNVETSVIIDTISKYSSDCEAGSSKSKAIDHFLAMGFDEEKVVKAIQEHGEDNMEAIANALLSCPEAKKLPAAVEEEDGIDWSSSDDDTNYTDMLNSDDEKDPNSNENGSKIRSLVKMGFSELEASLAVERCGENVDIAELTDFLCAAQMAREFSEFYTEHEEQKPRHNIKKRRFESKGEPRSSVDDEPIRLPNPMIGFGVPNEPGLITHRSLPELARGPPFFYYENVALTPKGVWETISRHLFEIPPEFVDSKYFCVAARKRGYIHNLPINNRFQIQPPPKYTIHDAFPLSKRWWPEWDKRTKLNCILTCTGSAQLTNRIRVALEPYNEEPEPPKHVQRYVIDQCKKWNLVWVGKNKAAPLEPDEMESILGFPKNHTRGGGMSRTERFKSLGNSFQVDTVAYHLSVLKPIFPHGINVLSLFTGIGGGEVALHRLQIKMKLVVSVEISKVNRNILKDFWEQTNQTGELIEFSDIQHLTNDTIEGLMEKYGGFDLVIGGSPCNNLAGGNRVSRVGLEGDQSSLFFEYCRILEVVRARMRGSGGPSSGAPPPSGGSPAGSPTSTEEGTSESATPESGPGTSTEPSEGSAPGSPAGSPTSTEEGTSTEPSEGSAPGTSTEPSEPKKKRKVMDKKYSIGLAIGTNSVGWAVITDEYKVPSKKFKVLGNTDRHSIKKNLIGALLFDSGETAEATRLKRTARRRYTRRKNRICYLQEIFSNEMAKVDDSFFHRLEESFLVEEDKKHERHPIFGNIVDEVAYHEKYPTIYHLRKKLVDSTDKADLRLIYLALAHMIKFRGHFLIEGDLNPDNSDVDKLFIQLVQTYNQLFEENPINASGVDAKAILSARLSKSRRLENLIAQLPGEKKNGLFGNLIALSLGLTPNFKSNFDLAEDAKLQLSKDTYDDDLDNLLAQIGDQYADLFLAAKNLSDAILLSDILRVNTEITKAPLSASMIKRYDEHHQDLTLLKALVRQQLPEKYKEIFFDQSKNGYAGYIDGGASQEEFYKFIKPILEKMDGTEELLVKLNREDLLRKQRTFDNGSIPHQIHLGELHAILRRQEDFYPFLKDNREKIEKILTFRIPYYVGPLARGNSRFAWMTRKSEETITPWNFEEVVDKGASAQSFIERMTNFDKNLPNEKVLPKHSLLYEYFTVYNELTKVKYVTEGMRKPAFLSGEQKKAIVDLLFKTNRKVTVKQLKEDYFKKIECFDSVEISGVEDRFNASLGTYHDLLKIIKDKDFLDNEENEDILEDIVLTLTLFEDREMIEERLKTYAHLFDDKVMKQLKRRRYTGWGRLSRKLINGIRDKQSGKTILDFLKSDGFANRNFMQLIHDDSLTFKEDIQKAQVSGQGDSLHEHIANLAGSPAIKKGILQTVKVVDELVKVMGRHKPENIVIEMARENQTTQKGQKNSRERMKRIEEGIKELGSQILKEHPVENTQLQNEKLYLYYLQNGRDMYVDQELDINRLSDYDVDAIVPQSFLKDDSIDNKVLTRSDKNRGKSDNVPSEEVVKKMKNYWRQLLNAKLITQRKFDNLTKAERGGLSELDKAGFIKRQLVETRQITKHVAQILDSRMNTKYDENDKLIREVKVITLKSKLVSDFRKDFQFYKVREINNYHHAHDAYLNAVVGTALIKKYPKLESEFVYGDYKVYDVRKMIAKSEQEIGKATAKYFFYSNIMNFFKTEITLANGEIRKRPLIETNGETGEIVWDKGRDFATVRKVLSMPQVNIVKKTEVQTGGFSKESILPKRNSDKLIARKKDWDPKKYGGFDSPTVAYSVLVVAKVEKGKSKKLKSVKELLGITIMERSSFEKNPIDFLEAKGYKEVKKDLIIKLPKYSLFELENGRKRMLASAGELQKGNELALPSKYVNFLYLASHYEKLKGSPEDNEQKQLFVEQHKHYLDEIIEQISEFSKRVILADANLDKVLSAYNKHRDKPIREQAENIIHLFTLTNLGAPAAFKYFDTTIDRKRYTSTKEVLDATLIHQSITGLYETRIDLSQLGGDPKKKRKV

SEQ ID NO: 1143 - protein, 1817 aa, synthetic construct
  REGION 1..1817: note = Description of Artificial Sequence: Synthetic polypeptide
METIRLPKPMIGFGVPTEPLPAMVRRTLPEQAVGPPFFYYENVALAPKGVWDTISRFLYDIEPEFVDSKYFCAAARKRGYIHNLPVENRFPLFPLAPRTIHEALPLSKKWWPSWDPRTKLNCLQTAIGSAQLTNRIRKAVEDFDGEPPMRVQKFVLDQCRKWNLVWVGRNKVAPLEPDEVEMLLGFPKNHTRGGGISRTDRYKSLGNSFQVDTVAYHLSVLKDLFPGGINVLSLFSGIGGGEVALYRLGIPLNTVVSVEKSEVNRDIVRSWWEQTNQRGNLIHFNDVQQLNGDRLEQLIESFGGFDLVIGGSPCNNLAGSNRVSRDGLEGKESSLFYDYVRILDLVKSIMSRHKHGGPSSGAPPPSGGSPAGSPTSTEEGTSESATPESGPGTSTEPSEGSAPGSPAGSPTSTEEGTSTEPSEGSAPGTSTEPSEPKKKRKVMDKKYSIGLAIGTNSVGWAVITDEYKVPSKKFKVLGNTDRHSIKKNLIGALLFDSGETAEATRLKRTARRRYTRRKNRICYLQEIFSNEMAKVDDSFFHRLEESFLVEEDKKHERHPIFGNIVDEVAYHEKYPTIYHLRKKLVDSTDKADLRLIYLALAHMIKFRGHFLIEGDLNPDNSDVDKLFIQLVQTYNQLFEENPINASGVDAKAILSARLSKSRRLENLIAQLPGEKKNGLFGNLIALSLGLTPNFKSNFDLAEDAKLQLSKDTYDDDLDNLLAQIGDQYADLFLAAKNLSDAILLSDILRVNTEITKAPLSASMIKRYDEHHQDLTLLKALVRQQLPEKYKEIFFDQSKNGYAGYIDGGASQEEFYKFIKPILEKMDGTEELLVKLNREDLLRKQRTFDNGSIPHQIHLGELHAILRRQEDFYPFLKDNREKIEKILTFRIPYYVGPLARGNSRFAWMTRKSEETITPWNFEEVVDKGASAQSFIERMTNFDKNLPNEKVLPKHSLLYEYFTVYNELTKVKYVTEGMRKPAFLSGEQKKAIVDLLFKTNRKVTVKQLKEDYFKKIECFDSVEISGVEDRFNASLGTYHDLLKIIKDKDFLDNEENEDILEDIVLTLTLFEDREMIEERLKTYAHLFDDKVMKQLKRRRYTGWGRLSRKLINGIRDKQSGKTILDFLKSDGFANRNFMQLIHDDSLTFKEDIQKAQVSGQGDSLHEHIANLAGSPAIKKGILQTVKVVDELVKVMGRHKPENIVIEMARENQTTQKGQKNSRERMKRIEEGIKELGSQILKEHPVENTQLQNEKLYLYYLQNGRDMYVDQELDINRLSDYDVDAIVPQSFLKDDSIDNKVLTRSDKNRGKSDNVPSEEVVKKMKNYWRQLLNAKLITQRKFDNLTKAERGGLSELDKAGFIKRQLVETRQITKHVAQILDSRMNTKYDENDKLIREVKVITLKSKLVSDFRKDFQFYKVREINNYHHAHDAYLNAVVGTALIKKYPKLESEFVYGDYKVYDVRKMIAKSEQEIGKATAKYFFYSNIMNFFKTEITLANGEIRKRPLIETNGETGEIVWDKGRDFATVRKVLSMPQVNIVKKTEVQTGGFSKESILPKRNSDKLIARKKDWDPKKYGGFDSPTVAYSVLVVAKVEKGKSKKLKSVKELLGITIMERSSFEKNPIDFLEAKGYKEVKKDLIIKLPKYSLFELENGRKRMLASAGELQKGNELALPSKYVNFLYLASHYEKLKGSPEDNEQKQLFVEQHKHYLDEIIEQISEFSKRVILADANLDKVLSAYNKHRDKPIREQAENIIHLFTLTNLGAPAAFKYFDTTIDRKRYTSTKEVLDATLIHQSITGLYETRIDLSQLGGDPKKKRKV

SEQ ID NO: 1144 - protein, 2253 aa, synthetic construct
  REGION 1..2253: note = Description of Artificial Sequence: Synthetic polypeptide
MAARNKQKKRAEPESDLCFAGKPMSVVESTIRWPHRYQSKKTKLQAPTKKPANKGGKKEDEEIIKQAKCHFDKALVDGVLINLNDDVYVTGLPGKLKFIAKVIELFEADDGVPYCRFRWYYRPEDTLIERFSHLVQPKRVFLSNDENDNPLTCIWSKVNIAKVPLPKITSRIEQRVIPPCDYYYDMKYEVPYLNFTSADDGSDASSSLSSDSALNCFENLHKDEKFLLDLYSGCGAMSTGFCMGASISGVKLITKWSVDINKFACDSLKLNHPETEVRNEAAEDFLALLKEWKRLCEKFSLVSSTEPVESISELEDEEVEENDDIDEASTGAELEPGEFEVEKFLGIMFGDPQGTGEKTLQLMVRWKGYNSSYDTWEPYSGLGNCKEKLKEYVIDGFKSHLLPLPGTVYTVCGGPPCQGISGYNRYRNNEAPLEDQKNQQLLVFLDIIDFLKPNYVLMENVVDLLRFSKGFLARHAVASFVAMNYQTRLGMMAAGSYGLPQLRNRVFLWAAQPSEKLPPYPLPTHEVAKKFNTPKEFKDLQVGRIQMEFLKLDNALTLADAISDLPPVTNYVANDVMDYNDAAPKTEFENFISLKRSETLLPAFGGDPTRRLFDHQPLVLGDDDLERVSYIPKQKGANYRDMPGVLVHNNKAEINPRFRAKLKSGKNVVPAYAISFIKGKSKKPFGRLWGDEIVNTVVTRAEPHNQCVIHPMQNRVLSVRENARLQGFPDCYKLCGTIKEKYIQVGNAVAVPVGVALGYAFGMASQGLTDDEPVIKLPFKYPECMQAKDQIGGPSSGAPPPSGGSPAGSPTSTEEGTSESATPESGPGTSTEPSEGSAPGSPAGSPTSTEEGTSTEPSEGSAPGTSTEPSEPKKKRKVMDKKYSIGLAIGTNSVGWAVITDEYKVPSKKFKVLGNTDRHSIKKNLIGALLFDSGETAEATRLKRTARRRYTRRKNRICYLQEIFSNEMAKVDDSFFHRLEESFLVEEDKKHERHPIFGNIVDEVAYHEKYPTIYHLRKKLVDSTDKADLRLIYLALAHMIKFRGHFLIEGDLNPDNSDVDKLFIQLVQTYNQLFEENPINASGVDAKAILSARLSKSRRLENLIAQLPGEKKNGLFGNLIALSLGLTPNFKSNFDLAEDAKLQLSKDTYDDDLDNLLAQIGDQYADLFLAAKNLSDAILLSDILRVNTEITKAPLSASMIKRYDEHHQDLTLLKALVRQQLPEKYKEIFFDQSKNGYAGYIDGGASQEEFYKFIKPILEKMDGTEELLVKLNREDLLRKQRTFDNGSIPHQIHLGELHAILRRQEDFYPFLKDNREKIEKILTFRIPYYVGPLARGNSRFAWMTRKSEETITPWNFEEVVDKGASAQSFIERMTNFDKNLPNEKVLPKHSLLYEYFTVYNELTKVKYVTEGMRKPAFLSGEQKKAIVDLLFKTNRKVTVKQLKEDYFKKIECFDSVEISGVEDRFNASLGTYHDLLKIIKDKDFLDNEENEDILEDIVLTLTLFEDREMIEERLKTYAHLFDDKVMKQLKRRRYTGWGRLSRKLINGIRDKQSGKTILDFLKSDGFANRNFMQLIHDDSLTFKEDIQKAQVSGQGDSLHEHIANLAGSPAIKKGILQTVKVVDELVKVMGRHKPENIVIEMARENQTTQKGQKNSRERMKRIEEGIKELGSQILKEHPVENTQLQNEKLYLYYLQNGRDMYVDQELDINRLSDYDVDAIVPQSFLKDDSIDNKVLTRSDKNRGKSDNVPSEEVVKKMKNYWRQLLNAKLITQRKFDNLTKAERGGLSELDKAGFIKRQLVETRQITKHVAQILDSRMNTKYDENDKLIREVKVITLKSKLVSDFRKDFQFYKVREINNYHHAHDAYLNAVVGTALIKKYPKLESEFVYGDYKVYDVRKMIAKSEQEIGKATAKYFFYSNIMNFFKTEITLANGEIRKRPLIETNGETGEIVWDKGRDFATVRKVLSMPQVNIVKKTEVQTGGFSKESILPKRNSDKLIARKKDWDPKKYGGFDSPTVAYSVLVVAKVEKGKSKKLKSVKELLGITIMERSSFEKNPIDFLEAKGYKEVKKDLIIKLPKYSLFELENGRKRMLASAGELQKGNELALPSKYVNFLYLASHYEKLKGSPEDNEQKQLFVEQHKHYLDEIIEQISEFSKRVILADANLDKVLSAYNKHRDKPIREQAENIIHLFTLTNLGAPAAFKYFDTTIDRKRYTSTKEVLDATLIHQSITGLYETRIDLSQLGGDPKKKRKV

SEQ ID NO: 1145 - protein, 2007 aa, synthetic construct
  REGION 1..2007: note = Description of Artificial Sequence: Synthetic polypeptide
MKFLLDLYSGCGAMSTGFCMGASISGVKLITKWSVDINKFACDSLKLNHPETEVRNEAAEDFLALLKEWKRLCEKFSLVSSTEPVESISELEDEEVEENDDIDEASTGAELEPGEFEVEKFLGIMFGDPQGTGEKTLQLMVRWKGYNSSYDTWEPYSGLGNCKEKLKEYVIDGFKSHLLPLPGTVYTVCGGPPCQGISGYNRYRNNEAPLEDQKNQQLLVFLDIIDFLKPNYVLMENVVDLLRFSKGFLARHAVASFVAMNYQTRLGMMAAGSYGLPQLRNRVFLWAAQPSEKLPPYPLPTHEVAKKFNTPKEFKDLQVGRIQMEFLKLDNALTLADAISDLPPVTNYVANDVMDYNDAAPKTEFENFISLKRSETLLPAFGGDPTRRLFDHQPLVLGDDDLERVSYIPKQKGANYRDMPGVLVHNNKAEINPRFRAKLKSGKNVVPAYAISFIKGKSKKPFGRLWGDEIVNTVVTRAEPHNQCVIHPMQNRVLSVRENARLQGFPDCYKLCGTIKEKYIQVGNAVAVPVGVALGYAFGMASQGLGGPSSGAPPPSGGSPAGSPTSTEEGTSESATPESGPGTSTEPSEGSAPGSPAGSPTSTEEGTSTEPSEGSAPGTSTEPSEPKKKRKVMDKKYSIGLAIGTNSVGWAVITDEYKVPSKKFKVLGNTDRHSIKKNLIGALLFDSGETAEATRLKRTARRRYTRRKNRICYLQEIFSNEMAKVDDSFFHRLEESFLVEEDKKHERHPIFGNIVDEVAYHEKYPTIYHLRKKLVDSTDKADLRLIYLALAHMIKFRGHFLIEGDLNPDNSDVDKLFIQLVQTYNQLFEENPINASGVDAKAILSARLSKSRRLENLIAQLPGEKKNGLFGNLIALSLGLTPNFKSNFDLAEDAKLQLSKDTYDDDLDNLLAQIGDQYADLFLAAKNLSDAILLSDILRVNTEITKAPLSASMIKRYDEHHQDLTLLKALVRQQLPEKYKEIFFDQSKNGYAGYIDGGASQEEFYKFIKPILEKMDGTEELLVKLNREDLLRKQRTFDNGSIPHQIHLGELHAILRRQEDFYPFLKDNREKIEKILTFRIPYYVGPLARGNSRFAWMTRKSEETITPWNFEEVVDKGASAQSFIERMTNFDKNLPNEKVLPKHSLLYEYFTVYNELTKVKYVTEGMRKPAFLSGEQKKAIVDLLFKTNRKVTVKQLKEDYFKKIECFDSVEISGVEDRFNASLGTYHDLLKIIKDKDFLDNEENEDILEDIVLTLTLFEDREMIEERLKTYAHLFDDKVMKQLKRRRYTGWGRLSRKLINGIRDKQSGKTILDFLKSDGFANRNFMQLIHDDSLTFKEDIQKAQVSGQGDSLHEHIANLAGSPAIKKGILQTVKVVDELVKVMGRHKPENIVIEMARENQTTQKGQKNSRERMKRIEEGIKELGSQILKEHPVENTQLQNEKLYLYYLQNGRDMYVDQELDINRLSDYDVDAIVPQSFLKDDSIDNKVLTRSDKNRGKSDNVPSEEVVKKMKNYWRQLLNAKLITQRKFDNLTKAERGGLSELDKAGFIKRQLVETRQITKHVAQILDSRMNTKYDENDKLIREVKVITLKSKLVSDFRKDFQFYKVREINNYHHAHDAYLNAVVGTALIKKYPKLESEFVYGDYKVYDVRKMIAKSEQEIGKATAKYFFYSNIMNFFKTEITLANGEIRKRPLIETNGETGEIVWDKGRDFATVRKVLSMPQVNIVKKTEVQTGGFSKESILPKRNSDKLIARKKDWDPKKYGGFDSPTVAYSVLVVAKVEKGKSKKLKSVKELLGITIMERSSFEKNPIDFLEAKGYKEVKKDLIIKLPKYSLFELENGRKRMLASAGELQKGNELALPSKYVNFLYLASHYEKLKGSPEDNEQKQLFVEQHKHYLDEIIEQISEFSKRVILADANLDKVLSAYNKHRDKPIREQAENIIHLFTLTNLGAPAAFKYFDTTIDRKRYTSTKEVLDATLIHQSITGLYETRIDLSQLGGDPKKKRKV

SEQ ID NO: 1146 - protein, 2757 aa, synthetic construct
  REGION 1..2757: note = Description of Artificial Sequence: Synthetic polypeptide
MLSPAKCESEEAQAPLDLHSSSRSEPECLSLVLWCPNPEEAAPSSTRELIKLPDNGEMSLRRSTTLNCNSPEENGGEGRVSQRKSSRGKSQPLLMLTNGCQLRRSPRFRALHANFDNVCSVPVTKGGVSQRKFSRGKSQPLLTLTNGCQLRRSPRFRAVDGNFDSVCSVPVTGKFGSRKRKSNSALDKKESSDSEGLTFKDIAVIAKSLEMEIISECQYKNNVAEGRSRLQDPAKRKVDSDTLLYSSINSSKQSLGSNKRMRRSQRFMKGTENEGEENLGKSKGKGMSLASCSFRRSTRLSGTVETGNTETLNRRKDCGPALCGAEQVRGTERLVQISKKDHCCEAMKKCEGDGLVSSKQELLVFPSGCIKKTVNGCRDRTLGKPRSSGLNTDDIHTSSLKISKNDTSNGLTMTTALVEQDAMESLLQGKTSACGAADKGKTREMHVNSTVIYLSDSDEPSSIEYLNGDNLTQVESGSALSSGGNEGIVSLDLNNPTKSTKRKGKRVTRTAVQEQNKRSICFFIGEPLSCEEAQERWRWRYELKERKSKSRGQQSEDDEDKIVANVECHYSQAKVDGHTFSLGDFAYIKGEEEETHVGQIVEFFKTTDGESYFRVQWFYRATDTIMERQATNHDKRRLFYSTVMNDNPVDCLISKVTVLQVSPRVGLKPNSIKSDYYFDMEYCVEYSTFQTLRNPKTSENKLECCADVVPTESTESILKKKSFSGELPVLDLYSGCGGMSTGLSLGAKISGVDVVTKWAVDQNTAACKSLKLNHPNTQVRNDAAGDFLQLLKEWDKLCKRYVFNNDQRTDTLRSVNSTKETSGSSSSSDDDSDSEEYEVEKLVDICFGDHDKTGKNGLKFKVHWKGYRSDEDTWELAEELSNCQDAIREFVTSGFKSKILPLPGRVGVICGGPPCQGISGYNRHRNVDSPLNDERNQQIIVFMDIVEYLKPSYVLMENVVDILRMDKGSLGRYALSRLVNMRYQARLGIMTAGCYGLSQFRSRVFMWGAVPNKNLPPFPLPTHDVIVRYGLPLEFERNVVAYAEGQPRKLEKALVLKDAISDLPHVSNDEDREKLPYESLPKTDFQRYIRSTKRDLTGSAIDNCNKRTMLLHDHRPFHINEDDYARVCQIPKRKGANFRDLPGLIVRNNTVCRDPSMEPVILPSGKPLVPGYVFTFQQGKSKRPFARLWWDETVPTVLTVPTCHSQALLHPEQDRVLTIRESARLQGFPDYFQFCGTIKERYCQIGNAVAVSVSRALGYSLGMAFRGLARDEHLIKLPQNFSHSTYPQLQETIPHGGPSSGAPPPSGGSPAGSPTSTEEGTSESATPESGPGTSTEPSEGSAPGSPAGSPTSTEEGTSTEPSEGSAPGTSTEPSEPKKKRKVMDKKYSIGLAIGTNSVGWAVITDEYKVPSKKFKVLGNTDRHSIKKNLIGALLFDSGETAEATRLKRTARRRYTRRKNRICYLQEIFSNEMAKVDDSFFHRLEESFLVEEDKKHERHPIFGNIVDEVAYHEKYPTIYHLRKKLVDSTDKADLRLIYLALAHMIKFRGHFLIEGDLNPDNSDVDKLFIQLVQTYNQLFEENPINASGVDAKAILSARLSKSRRLENLIAQLPGEKKNGLFGNLIALSLGLTPNFKSNFDLAEDAKLQLSKDTYDDDLDNLLAQIGDQYADLFLAAKNLSDAILLSDILRVNTEITKAPLSASMIKRYDEHHQDLTLLKALVRQQLPEKYKEIFFDQSKNGYAGYIDGGASQEEFYKFIKPILEKMDGTEELLVKLNREDLLRKQRTFDNGSIPHQIHLGELHAILRRQEDFYPFLKDNREKIEKILTFRIPYYVGPLARGNSRFAWMTRKSEETITPWNFEEVVDKGASAQSFIERMTNFDKNLPNEKVLPKHSLLYEYFTVYNELTKVKYVTEGMRKPAFLSGEQKKAIVDLLFKTNRKVTVKQLKEDYFKKIECFDSVEISGVEDRFNASLGTYHDLLKIIKDKDFLDNEENEDILEDIVLTLTLFEDREMIEERLKTYAHLFDDKVMKQLKRRRYTGWGRLSRKLINGIRDKQSGKTILDFLKSDGFANRNFMQLIHDDSLTFKEDIQKAQVSGQGDSLHEHIANLAGSPAIKKGILQTVKVVDELVKVMGRHKPENIVIEMARENQTTQKGQKNSRERMKRIEEGIKELGSQILKEHPVENTQLQNEKLYLYYLQNGRDMYVDQELDINRLSDYDVDAIVPQSFLKDDSIDNKVLTRSDKNRGKSDNVPSEEVVKKMKNYWRQLLNAKLITQRKFDNLTKAERGGLSELDKAGFIKRQLVETRQITKHVAQILDSRMNTKYDENDKLIREVKVITLKSKLVSDFRKDFQFYKVREINNYHHAHDAYLNAVVGTALIKKYPKLESEFVYGDYKVYDVRKMIAKSEQEIGKATAKYFFYSNIMNFFKTEITLANGEIRKRPLIETNGETGEIVWDKGRDFATVRKVLSMPQVNIVKKTEVQTGGFSKESILPKRNSDKLIARKKDWDPKKYGGFDSPTVAYSVLVVAKVEKGKSKKLKSVKELLGITIMERSSFEKNPIDFLEAKGYKEVKKDLIIKLPKYSLFELENGRKRMLASAGELQKGNELALPSKYVNFLYLASHYEKLKGSPEDNEQKQLFVEQHKHYLDEIIEQISEFSKRVILADANLDKVLSAYNKHRDKPIREQAENIIHLFTLTNLGAPAAFKYFDTTIDRKRYTSTKEVLDATLIHQSITGLYETRIDLSQLGGDPKKKRKV

SEQ ID NO: 1147 - protein, 2005 aa, synthetic construct
  REGION 1..2005: note = Description of Artificial Sequence: Synthetic polypeptide
MLPVLDLYSGCGGMSTGLSLGAKISGVDVVTKWAVDQNTAACKSLKLNHPNTQVRNDAAGDFLQLLKEWDKLCKRYVFNNDQRTDTLRSVNSTKETSGSSSSSDDDSDSEEYEVEKLVDICFGDHDKTGKNGLKFKVHWKGYRSDEDTWELAEELSNCQDAIREFVTSGFKSKILPLPGRVGVICGGPPCQGISGYNRHRNVDSPLNDERNQQIIVFMDIVEYLKPSYVLMENVVDILRMDKGSLGRYALSRLVNMRYQARLGIMTAGCYGLSQFRSRVFMWGAVPNKNLPPFPLPTHDVIVRYGLPLEFERNVVAYAEGQPRKLEKALVLKDAISDLPHVSNDEDREKLPYESLPKTDFQRYIRSTKRDLTGSAIDNCNKRTMLLHDHRPFHINEDDYARVCQIPKRKGANFRDLPGLIVRNNTVCRDPSMEPVILPSGKPLVPGYVFTFQQGKSKRPFARLWWDETVPTVLTVPTCHSQALLHPEQDRVLTIRESARLQGFPDYFQFCGTIKERYCQIGNAVAVSVSRALGYSLGMAFRGLGGPSSGAPPPSGGSPAGSPTSTEEGTSESATPESGPGTSTEPSEGSAPGSPAGSPTSTEEGTSTEPSEGSAPGTSTEPSEPKKKRKVMDKKYSIGLAIGTNSVGWAVITDEYKVPSKKFKVLGNTDRHSIKKNLIGALLFDSGETAEATRLKRTARRRYTRRKNRICYLQEIFSNEMAKVDDSFFHRLEESFLVEEDKKHERHPIFGNIVDEVAYHEKYPTIYHLRKKLVDSTDKADLRLIYLALAHMIKFRGHFLIEGDLNPDNSDVDKLFIQLVQTYNQLFEENPINASGVDAKAILSARLSKSRRLENLIAQLPGEKKNGLFGNLIALSLGLTPNFKSNFDLAEDAKLQLSKDTYDDDLDNLLAQIGDQYADLFLAAKNLSDAILLSDILRVNTEITKAPLSASMIKRYDEHHQDLTLLKALVRQQLPEKYKEIFFDQSKNGYAGYIDGGASQEEFYKFIKPILEKMDGTEELLVKLNREDLLRKQRTFDNGSIPHQIHLGELHAILRRQEDFYPFLKDNREKIEKILTFRIPYYVGPLARGNSRFAWMTRKSEETITPWNFEEVVDKGASAQSFIERMTNFDKNLPNEKVLPKHSLLYEYFTVYNELTKVKYVTEGMRKPAFLSGEQKKAIVDLLFKTNRKVTVKQLKEDYFKKIECFDSVEISGVEDRFNASLGTYHDLLKIIKDKDFLDNEENEDILEDIVLTLTLFEDREMIEERLKTYAHLFDDKVMKQLKRRRYTGWGRLSRKLINGIRDKQSGKTILDFLKSDGFANRNFMQLIHDDSLTFKEDIQKAQVSGQGDSLHEHIANLAGSPAIKKGILQTVKVVDELVKVMGRHKPENIVIEMARENQTTQKGQKNSRERMKRIEEGIKELGSQILKEHPVENTQLQNEKLYLYYLQNGRDMYVDQELDINRLSDYDVDAIVPQSFLKDDSIDNKVLTRSDKNRGKSDNVPSEEVVKKMKNYWRQLLNAKLITQRKFDNLTKAERGGLSELDKAGFIKRQLVETRQITKHVAQILDSRMNTKYDENDKLIREVKVITLKSKLVSDFRKDFQFYKVREINNYHHAHDAYLNAVVGTALIKKYPKLESEFVYGDYKVYDVRKMIAKSEQEIGKATAKYFFYSNIMNFFKTEITLANGEIRKRPLIETNGETGEIVWDKGRDFATVRKVLSMPQVNIVKKTEVQTGGFSKESILPKRNSDKLIARKKDWDPKKYGGFDSPTVAYSVLVVAKVEKGKSKKLKSVKELLGITIMERSSFEKNPIDFLEAKGYKEVKKDLIIKLPKYSLFELENGRKRMLASAGELQKGNELALPSKYVNFLYLASHYEKLKGSPEDNEQKQLFVEQHKHYLDEIIEQISEFSKRVILADANLDKVLSAYNKHRDKPIREQAENIIHLFTLTNLGAPAAFKYFDTTIDRKRYTSTKEVLDATLIHQSITGLYETRIDLSQLGGDPKKKRKV

SEQ ID NO: 1148 - protein, 2301 aa, synthetic construct
  REGION 1..2301: note = Description of Artificial Sequence: Synthetic polypeptide
MAPKRKRPATKDDTTKSIPKPKKRAPKRAKTVKEEPVTVVEEGEKHVARFLDEPIPESEAKSTWPDRYKPIEVQPPKASSRKKTKDDEKVEIIRARCHYRRAIVDERQIYELNDDAYVQSGEGKDPFICKIIEMFEGANGKLYFTARWFYRPSDTVMKEFEILIKKKRVFFSEIQDTNELGLLEKKLNILMIPLNENTKETIPATENCDFFCDMNYFLPYDTFEAIQQETMMAISESSTISSDTDIREGAAAISEIGECSQETEGHKKATLLDLYSGCGAMSTGLCMGAQLSGLNLVTKWAVDMNAHACKSLQHNHPETNVRNMTAEDFLFLLKEWEKLCIHFSLRNSPNSEEYANLHGLNNVEDNEDVSEESENEDDGEVFTVDKIVGISFGVPKKLLKRGLYLKVRWLNYDDSHDTWEPIEGLSNCRGKIEEFVKLGYKSGILPLPGGVDVVCGGPPCQGISGHNRFRNLLDPLEDQKNKQLLVYMNIVEYLKPKFVLMENVVDMLKMAKGYLARFAVGRLLQMNYQVRNGMMAAGAYGLAQFRLRFFLWGALPSEIIPQFPLPTHDLVHRGNIVKEFQGNIVAYDEGHTVKLADKLLLKDVISDLPAVANSEKRDEITYDKDPTTPFQKFIRLRKDEASGSQSKSKSKKHVLYDHHPLNLNINDYERVCQVPKRKGANFRDFPGVIVGPGNVVKLEEGKERVKLESGKTLVPDYALTYVDGKSCKPFGRLWWDEIVPTVVTRAEPHNQVIIHPEQNRVLSIRENARLQGFPDDYKLFGPPKQKYIQVGNAVAVPVAKALGYALGTAFQGLAVGKDPLLTLPEGFAFMKPTLPSELAGGPSSGAPPPSGGSPAGSPTSTEEGTSESATPESGPGTSTEPSEGSAPGSPAGSPTSTEEGTSTEPSEGSAPGTSTEPSEPKKKRKVMDKKYSIGLAIGTNSVGWAVITDEYKVPSKKFKVLGNTDRHSIKKNLIGALLFDSGETAEATRLKRTARRRYTRRKNRICYLQEIFSNEMAKVDDSFFHRLEESFLVEEDKKHERHPIFGNIVDEVAYHEKYPTIYHLRKKLVDSTDKADLRLIYLALAHMIKFRGHFLIEGDLNPDNSDVDKLFIQLVQTYNQLFEENPINASGVDAKAILSARLSKSRRLENLIAQLPGEKKNGLFGNLIALSLGLTPNFKSNFDLAEDAKLQLSKDTYDDDLDNLLAQIGDQYADLFLAAKNLSDAILLSDILRVNTEITKAPLSASMIKRYDEHHQDLTLLKALVRQQLPEKYKEIFFDQSKNGYAGYIDGGASQEEFYKFIKPILEKMDGTEELLVKLNREDLLRKQRTFDNGSIPHQIHLGELHAILRRQEDFYPFLKDNREKIEKILTFRIPYYVGPLARGNSRFAWMTRKSEETITPWNFEEVVDKGASAQSFIERMTNFDKNLPNEKVLPKHSLLYEYFTVYNELTKVKYVTEGMRKPAFLSGEQKKAIVDLLFKTNRKVTVKQLKEDYFKKIECFDSVEISGVEDRFNASLGTYHDLLKIIKDKDFLDNEENEDILEDIVLTLTLFEDREMIEERLKTYAHLFDDKVMKQLKRRRYTGWGRLSRKLINGIRDKQSGKTILDFLKSDGFANRNFMQLIHDDSLTFKEDIQKAQVSGQGDSLHEHIANLAGSPAIKKGILQTVKVVDELVKVMGRHKPENIVIEMARENQTTQKGQKNSRERMKRIEEGIKELGSQILKEHPVENTQLQNEKLYLYYLQNGRDMYVDQELDINRLSDYDVDAIVPQSFLKDDSIDNKVLTRSDKNRGKSDNVPSEEVVKKMKNYWRQLLNAKLITQRKFDNLTKAERGGLSELDKAGFIKRQLVETRQITKHVAQILDSRMNTKYDENDKLIREVKVITLKSKLVSDFRKDFQFYKVREINNYHHAHDAYLNAVVGTALIKKYPKLESEFVYGDYKVYDVRKMIAKSEQEIGKATAKYFFYSNIMNFFKTEITLANGEIRKRPLIETNGETGEIVWDKGRDFATVRKVLSMPQVNIVKKTEVQTGGFSKESILPKRNSDKLIARKKDWDPKKYGGFDSPTVAYSVLVVAKVEKGKSKKLKSVKELLGITIMERSSFEKNPIDFLEAKGYKEVKKDLIIKLPKYSLFELENGRKRMLASAGELQKGNELALPSKYVNFLYLASHYEKLKGSPEDNEQKQLFVEQHKHYLDEIIEQISEFSKRVILADANLDKVLSAYNKHRDKPIREQAENIIHLFTLTNLGAPAAFKYFDTTIDRKRYTSTKEVLDATLIHQSITGLYETRIDLSQLGGDPKKKRKV

SEQ ID NO: 1149 - protein, 2008 aa, synthetic construct
  REGION 1..2008: note = Description of Artificial Sequence: Synthetic polypeptide
MATLLDLYSGCGAMSTGLCMGAQLSGLNLVTKWAVDMNAHACKSLQHNHPETNVRNMTAEDFLFLLKEWEKLCIHFSLRNSPNSEEYANLHGLNNVEDNEDVSEESENEDDGEVFTVDKIVGISFGVPKKLLKRGLYLKVRWLNYDDSHDTWEPIEGLSNCRGKIEEFVKLGYKSGILPLPGGVDVVCGGPPCQGISGHNRFRNLLDPLEDQKNKQLLVYMNIVEYLKPKFVLMENVVDMLKMAKGYLARFAVGRLLQMNYQVRNGMMAAGAYGLAQFRLRFFLWGALPSEIIPQFPLPTHDLVHRGNIVKEFQGNIVAYDEGHTVKLADKLLLKDVISDLPAVANSEKRDEITYDKDPTTPFQKFIRLRKDEASGSQSKSKSKKHVLYDHHPLNLNINDYERVCQVPKRKGANFRDFPGVIVGPGNVVKLEEGKERVKLESGKTLVPDYALTYVDGKSCKPFGRLWWDEIVPTVVTRAEPHNQVIIHPEQNRVLSIRENARLQGFPDDYKLFGPPKQKYIQVGNAVAVPVAKALGYALGTAFQGLGGPSSGAPPPSGGSPAGSPTSTEEGTSESATPESGPGTSTEPSEGSAPGSPAGSPTSTEEGTSTEPSEGSAPGTSTEPSEPKKKRKVMDKKYSIGLAIGTNSVGWAVITDEYKVPSKKFKVLGNTDRHSIKKNLIGALLFDSGETAEATRLKRTARRRYTRRKNRICYLQEIFSNEMAKVDDSFFHRLEESFLVEEDKKHERHPIFGNIVDEVAYHEKYPTIYHLRKKLVDSTDKADLRLIYLALAHMIKFRGHFLIEGDLNPDNSDVDKLFIQLVQTYNQLFEENPINASGVDAKAILSARLSKSRRLENLIAQLPGEKKNGLFGNLIALSLGLTPNFKSNFDLAEDAKLQLSKDTYDDDLDNLLAQIGDQYADLFLAAKNLSDAILLSDILRVNTEITKAPLSASMIKRYDEHHQDLTLLKALVRQQLPEKYKEIFFDQSKNGYAGYIDGGASQEEFYKFIKPILEKMDGTEELLVKLNREDLLRKQRTFDNGSIPHQIHLGELHAILRRQEDFYPFLKDNREKIEKILTFRIPYYVGPLARGNSRFAWMTRKSEETITPWNFEEVVDKGASAQSFIERMTNFDKNLPNEKVLPKHSLLYEYFTVYNELTKVKYVTEGMRKPAFLSGEQKKAIVDLLFKTNRKVTVKQLKEDYFKKIECFDSVEISGVEDRFNASLGTYHDLLKIIKDKDFLDNEENEDILEDIVLTLTLFEDREMIEERLKTYAHLFDDKVMKQLKRRRYTGWGRLSRKLINGIRDKQSGKTILDFLKSDGFANRNFMQLIHDDSLTFKEDIQKAQVSGQGDSLHEHIANLAGSPAIKKGILQTVKVVDELVKVMGRHKPENIVIEMARENQTTQKGQKNSRERMKRIEEGIKELGSQILKEHPVENTQLQNEKLYLYYLQNGRDMYVDQELDINRLSDYDVDAIVPQSFLKDDSIDNKVLTRSDKNRGKSDNVPSEEVVKKMKNYWRQLLNAKLITQRKFDNLTKAERGGLSELDKAGFIKRQLVETRQITKHVAQILDSRMNTKYDENDKLIREVKVITLKSKLVSDFRKDFQFYKVREINNYHHAHDAYLNAVVGTALIKKYPKLESEFVYGDYKVYDVRKMIAKSEQEIGKATAKYFFYSNIMNFFKTEITLANGEIRKRPLIETNGETGEIVWDKGRDFATVRKVLSMPQVNIVKKTEVQTGGFSKESILPKRNSDKLIARKKDWDPKKYGGFDSPTVAYSVLVVAKVEKGKSKKLKSVKELLGITIMERSSFEKNPIDFLEAKGYKEVKKDLIIKLPKYSLFELENGRKRMLASAGELQKGNELALPSKYVNFLYLASHYEKLKGSPEDNEQKQLFVEQHKHYLDEIIEQISEFSKRVILADANLDKVLSAYNKHRDKPIREQAENIIHLFTLTNLGAPAAFKYFDTTIDRKRYTSTKEVLDATLIHQSITGLYETRIDLSQLGGDPKKKRKV

SEQ ID NO: 1150 - protein, 2037 aa, synthetic construct
  REGION 1..2037: note = Description of Artificial Sequence: Synthetic polypeptide
MHKKATLLDLYSGCGAMSTGLCMGAQLSGLNLVTKWAVDMNAHACKSLQHNHPETNVRNMTAEDFLFLLKEWEKLCIHFSLRNSPNSEEYANLHGLNNVEDNEDVSEESENEDDGEVFTVDKIVGISFGVPKKLLKRGLYLKVRWLNYDDSHDTWEPIEGLSNCRGKIEEFVKLGYKSGILPLPGGVDVVCGGPPCQGISGHNRFRNLLDPLEDQKNKQLLVYMNIVEYLKPKFVLMENVVDMLKMAKGYLARFAVGRLLQMNYQVRNGMMAAGAYGLAQFRLRFFLWGALPSEIIPQFPLPTHDLVHRGNIVKEFQGNIVAYDEGHTVKLADKLLLKDVISDLPAVANSEKRDEITYDKDPTTPFQKFIRLRKDEASGSQSKSKSKKHVLYDHHPLNLNINDYERVCQVPKRKGANFRDFPGVIVGPGNVVKLEEGKERVKLESGKTLVPDYALTYVDGKSCKPFGRLWWDEIVPTVVTRAEPHNQVIIHPEQNRVLSIRENARLQGFPDDYKLFGPPKQKYIQVGNAVAVPVAKALGYALGTAFQGLAVGKDPLLTLPEGFAFMKPTLPSELAGGPSSGAPPPSGGSPAGSPTSTEEGTSESATPESGPGTSTEPSEGSAPGSPAGSPTSTEEGTSTEPSEGSAPGTSTEPSEPKKKRKVMDKKYSIGLAIGTNSVGWAVITDEYKVPSKKFKVLGNTDRHSIKKNLIGALLFDSGETAEATRLKRTARRRYTRRKNRICYLQEIFSNEMAKVDDSFFHRLEESFLVEEDKKHERHPIFGNIVDEVAYHEKYPTIYHLRKKLVDSTDKADLRLIYLALAHMIKFRGHFLIEGDLNPDNSDVDKLFIQLVQTYNQLFEENPINASGVDAKAILSARLSKSRRLENLIAQLPGEKKNGLFGNLIALSLGLTPNFKSNFDLAEDAKLQLSKDTYDDDLDNLLAQIGDQYADLFLAAKNLSDAILLSDILRVNTEITKAPLSASMIKRYDEHHQDLTLLKALVRQQLPEKYKEIFFDQSKNGYAGYIDGGASQEEFYKFIKPILEKMDGTEELLVKLNREDLLRKQRTFDNGSIPHQIHLGELHAILRRQEDFYPFLKDNREKIEKILTFRIPYYVGPLARGNSRFAWMTRKSEETITPWNFEEVVDKGASAQSFIERMTNFDKNLPNEKVLPKHSLLYEYFTVYNELTKVKYVTEGMRKPAFLSGEQKKAIVDLLFKTNRKVTVKQLKEDYFKKIECFDSVEISGVEDRFNASLGTYHDLLKIIKDKDFLDNEENEDILEDIVLTLTLFEDREMIEERLKTYAHLFDDKVMKQLKRRRYTGWGRLSRKLINGIRDKQSGKTILDFLKSDGFANRNFMQLIHDDSLTFKEDIQKAQVSGQGDSLHEHIANLAGSPAIKKGILQTVKVVDELVKVMGRHKPENIVIEMARENQTTQKGQKNSRERMKRIEEGIKELGSQILKEHPVENTQLQNEKLYLYYLQNGRDMYVDQELDINRLSDYDVDAIVPQSFLKDDSIDNKVLTRSDKNRGKSDNVPSEEVVKKMKNYWRQLLNAKLITQRKFDNLTKAERGGLSELDKAGFIKRQLVETRQITKHVAQILDSRMNTKYDENDKLIREVKVITLKSKLVSDFRKDFQFYKVREINNYHHAHDAYLNAVVGTALIKKYPKLESEFVYGDYKVYDVRKMIAKSEQEIGKATAKYFFYSNIMNFFKTEITLANGEIRKRPLIETNGETGEIVWDKGRDFATVRKVLSMPQVNIVKKTEVQTGGFSKESILPKRNSDKLIARKKDWDPKKYGGFDSPTVAYSVLVVAKVEKGKSKKLKSVKELLGITIMERSSFEKNPIDFLEAKGYKEVKKDLIIKLPKYSLFELENGRKRMLASAGELQKGNELALPSKYVNFLYLASHYEKLKGSPEDNEQKQLFVEQHKHYLDEIIEQISEFSKRVILADANLDKVLSAYNKHRDKPIREQAENIIHLFTLTNLGAPAAFKYFDTTIDRKRYTSTKEVLDATLIHQSITGLYETRIDLSQLGGDPKKKRKV

SEQ ID NO: 1151 - protein, 2374 aa, synthetic construct
  REGION 1..2374: note = Description of Artificial Sequence: Synthetic polypeptide
MAPSSPSPAAPTRVSGRKRAAKAEEIHQNKEEEEEVAAASSAKRSRKAASSGKKPKSPPKQAKPGRKKKGDAEMKEPVEDDVCAEEPDEEELAMGEEEAEEQAMQEEVVAVAAGSPGKKRVGRRNAAAAAGDHEPEFIGSPVAADEARSNWPKRYGRSTAAKKPDEEEELKARCHYRSAKVDNVVYCLGDDVYVKAGENEADYIGRITEFFEGTDQCHYFTCRWFFRAEDTVINSLVSISVDGHKHDPRRVFLSEEKNDNVLDCIISKVKIVHVDPNMDPKAKAQLIESCDLYYDMSYSVAYSTFANISSENGQSGSDTASGISSDDVDLETSSSMPTRTATLLDLYSGCGGMSTGLCLGAALSGLKLETRWAVDFNSFACQSLKYNHPQTEVRNEKADEFLALLKEWAVLCKKYVQDVDSNLASSEDQADEDSPLDKDEFVVEKLVGICYGGSDRENGIYFKVQWEGYGPEEDTWEPIDNLSDCPQKIREFVQEGHKRKILPLPGDVDVICGGPPCQGISGFNRYRNRDEPLKDEKNKQMVTFMDIVAYLKPKYVLMENVVDILKFADGYLGKYALSCLVAMKYQARLGMMVAGCYGLPQFRMRVFLWGALSSMVLPKYPLPTYDVVVRGGAPNAFSQCMVAYDETQKPSLKKALLLGDAISDLPKVQNHQPNDVMEYGGSPKTEFQRYIRLSRKDMLDWSFGEGAGPDEGKLLDHQPLRLNNDDYERVQQIPVKKGANFRDLKGVRVGANNIVEWDPEIERVKLSSGKPLVPDYAMSFIKGKSLKPFGRLWWDETVPTVVTRAEPHNQVIIHPTQARVLTIRENARLQGFPDYYRLFGPIKEKYIQVGNAVAVPVARALGYCLGQAYLGESEGSDPLYQLPPSFTSVGGRTAGQARASPVGTPAGEVVEQGGPSSGAPPPSGGSPAGSPTSTEEGTSESATPESGPGTSTEPSEGSAPGSPAGSPTSTEEGTSTEPSEGSAPGTSTEPSEPKKKRKVMDKKYSIGLAIGTNSVGWAVITDEYKVPSKKFKVLGNTDRHSIKKNLIGALLFDSGETAEATRLKRTARRRYTRRKNRICYLQEIFSNEMAKVDDSFFHRLEESFLVEEDKKHERHPIFGNIVDEVAYHEKYPTIYHLRKKLVDSTDKADLRLIYLALAHMIKFRGHFLIEGDLNPDNSDVDKLFIQLVQTYNQLFEENPINASGVDAKAILSARLSKSRRLENLIAQLPGEKKNGLFGNLIALSLGLTPNFKSNFDLAEDAKLQLSKDTYDDDLDNLLAQIGDQYADLFLAAKNLSDAILLSDILRVNTEITKAPLSASMIKRYDEHHQDLTLLKALVRQQLPEKYKEIFFDQSKNGYAGYIDGGASQEEFYKFIKPILEKMDGTEELLVKLNREDLLRKQRTFDNGSIPHQIHLGELHAILRRQEDFYPFLKDNREKIEKILTFRIPYYVGPLARGNSRFAWMTRKSEETITPWNFEEVVDKGASAQSFIERMTNFDKNLPNEKVLPKHSLLYEYFTVYNELTKVKYVTEGMRKPAFLSGEQKKAIVDLLFKTNRKVTVKQLKEDYFKKIECFDSVEISGVEDRFNASLGTYHDLLKIIKDKDFLDNEENEDILEDIVLTLTLFEDREMIEERLKTYAHLFDDKVMKQLKRRRYTGWGRLSRKLINGIRDKQSGKTILDFLKSDGFANRNFMQLIHDDSLTFKEDIQKAQVSGQGDSLHEHIANLAGSPAIKKGILQTVKVVDELVKVMGRHKPENIVIEMARENQTTQKGQKNSRERMKRIEEGIKELGSQILKEHPVENTQLQNEKLYLYYLQNGRDMYVDQELDINRLSDYDVDAIVPQSFLKDDSIDNKVLTRSDKNRGKSDNVPSEEVVKKMKNYWRQLLNAKLITQRKFDNLTKAERGGLSELDKAGFIKRQLVETRQITKHVAQILDSRMNTKYDENDKLIREVKVITLKSKLVSDFRKDFQFYKVREINNYHHAHDAYLNAVVGTALIKKYPKLESEFVYGDYKVYDVRKMIAKSEQEIGKATAKYFFYSNIMNFFKTEITLANGEIRKRPLIETNGETGEIVWDKGRDFATVRKVLSMPQVNIVKKTEVQTGGFSKESILPKRNSDKLIARKKDWDPKKYGGFDSPTVAYSVLVVAKVEKGKSKKLKSVKELLGITIMERSSFEKNPIDFLEAKGYKEVKKDLIIKLPKYSLFELENGRKRMLASAGELQKGNELALPSKYVNFLYLASHYEKLKGSPEDNEQKQLFVEQHKHYLDEIIEQISEFSKRVILADANLDKVLSAYNKHRDKPIREQAENIIHLFTLTNLGAPAAFKYFDTTIDRKRYTSTKEVLDATLIHQSITGLYETRIDLSQLGGDPKKKRKV

SEQ ID NO: 1152 - protein, 1995 aa, synthetic construct
  REGION 1..1995: note = Description of Artificial Sequence: Synthetic polypeptide
MATLLDLYSGCGGMSTGLCLGAALSGLKLETRWAVDFNSFACQSLKYNHPQTEVRNEKADEFLALLKEWAVLCKKYVQDVDSNLASSEDQADEDSPLDKDEFVVEKLVGICYGGSDRENGIYFKVQWEGYGPEEDTWEPIDNLSDCPQKIREFVQEGHKRKILPLPGDVDVICGGPPCQGISGFNRYRNRDEPLKDEKNKQMVTFMDIVAYLKPKYVLMENVVDILKFADGYLGKYALSCLVAMKYQARLGMMVAGCYGLPQFRMRVFLWGALSSMVLPKYPLPTYDVVVRGGAPNAFSQCMVAYDETQKPSLKKALLLGDAISDLPKVQNHQPNDVMEYGGSPKTEFQRYIRLSRKDMLDWSFGEGAGPDEGKLLDHQPLRLNNDDYERVQQIPVKKGANFRDLKGVRVGANNIVEWDPEIERVKLSSGKPLVPDYAMSFIKGKSLKPFGRLWWDETVPTVVTRAEPHNQVIIHPTQARVLTIRENARLQGFPDYYRLFGPIKEKYIQVGNAVAVPVARALGYCLGQAYLGEGGPSSGAPPPSGGSPAGSPTSTEEGTSESATPESGPGTSTEPSEGSAPGSPAGSPTSTEEGTSTEPSEGSAPGTSTEPSEPKKKRKVMDKKYSIGLAIGTNSVGWAVITDEYKVPSKKFKVLGNTDRHSIKKNLIGALLFDSGETAEATRLKRTARRRYTRRKNRICYLQEIFSNEMAKVDDSFFHRLEESFLVEEDKKHERHPIFGNIVDEVAYHEKYPTIYHLRKKLVDSTDKADLRLIYLALAHMIKFRGHFLIEGDLNPDNSDVDKLFIQLVQTYNQLFEENPINASGVDAKAILSARLSKSRRLENLIAQLPGEKKNGLFGNLIALSLGLTPNFKSNFDLAEDAKLQLSKDTYDDDLDNLLAQIGDQYADLFLAAKNLSDAILLSDILRVNTEITKAPLSASMIKRYDEHHQDLTLLKALVRQQLPEKYKEIFFDQSKNGYAGYIDGGASQEEFYKFIKPILEKMDGTEELLVKLNREDLLRKQRTFDNGSIPHQIHLGELHAILRRQEDFYPFLKDNREKIEKILTFRIPYYVGPLARGNSRFAWMTRKSEETITPWNFEEVVDKGASAQSFIERMTNFDKNLPNEKVLPKHSLLYEYFTVYNELTKVKYVTEGMRKPAFLSGEQKKAIVDLLFKTNRKVTVKQLKEDYFKKIECFDSVEISGVEDRFNASLGTYHDLLKIIKDKDFLDNEENEDILEDIVLTLTLFEDREMIEERLKTYAHLFDDKVMKQLKRRRYTGWGRLSRKLINGIRDKQSGKTILDFLKSDGFANRNFMQLIHDDSLTFKEDIQKAQVSGQGDSLHEHIANLAGSPAIKKGILQTVKVVDELVKVMGRHKPENIVIEMARENQTTQKGQKNSRERMKRIEEGIKELGSQILKEHPVENTQLQNEKLYLYYLQNGRDMYVDQELDINRLSDYDVDAIVPQSFLKDDSIDNKVLTRSDKNRGKSDNVPSEEVVKKMKNYWRQLLNAKLITQRKFDNLTKAERGGLSELDKAGFIKRQLVETRQITKHVAQILDSRMNTKYDENDKLIREVKVITLKSKLVSDFRKDFQFYKVREINNYHHAHDAYLNAVVGTALIKKYPKLESEFVYGDYKVYDVRKMIAKSEQEIGKATAKYFFYSNIMNFFKTEITLANGEIRKRPLIETNGETGEIVWDKGRDFATVRKVLSMPQVNIVKKTEVQTGGFSKESILPKRNSDKLIARKKDWDPKKYGGFDSPTVAYSVLVVAKVEKGKSKKLKSVKELLGITIMERSSFEKNPIDFLEAKGYKEVKKDLIIKLPKYSLFELENGRKRMLASAGELQKGNELALPSKYVNFLYLASHYEKLKGSPEDNEQKQLFVEQHKHYLDEIIEQISEFSKRVILADANLDKVLSAYNKHRDKPIREQAENIIHLFTLTNLGAPAAFKYFDTTIDRKRYTSTKEVLDATLIHQSITGLYETRIDLSQLGGDPKKKRKV

SEQ ID NO: 1153 - protein, 2038 aa, synthetic construct
  REGION 1..2038: note = Description of Artificial Sequence: Synthetic polypeptide
MTRTATLLDLYSGCGGMSTGLCLGAALSGLKLETRWAVDFNSFACQSLKYNHPQTEVRNEKADEFLALLKEWAVLCKKYVQDVDSNLASSEDQADEDSPLDKDEFVVEKLVGICYGGSDRENGIYFKVQWEGYGPEEDTWEPIDNLSDCPQKIREFVQEGHKRKILPLPGDVDVICGGPPCQGISGFNRYRNRDEPLKDEKNKQMVTFMDIVAYLKPKYVLMENVVDILKFADGYLGKYALSCLVAMKYQARLGMMVAGCYGLPQFRMRVFLWGALSSMVLPKYPLPTYDVVVRGGAPNAFSQCMVAYDETQKPSLKKALLLGDAISDLPKVQNHQPNDVMEYGGSPKTEFQRYIRLSRKDMLDWSFGEGAGPDEGKLLDHQPLRLNNDDYERVQQIPVKKGANFRDLKGVRVGANNIVEWDPEIERVKLSSGKPLVPDYAMSFIKGKSLKPFGRLWWDETVPTVVTRAEPHNQVIIHPTQARVLTIRENARLQGFPDYYRLFGPIKEKYIQVGNAVAVPVARALGYCLGQAYLGESEGSDPLYQLPPSFTSVGGRTAGQARASPVGTPAGEVVEQGGPSSGAPPPSGGSPAGSPTSTEEGTSESATPESGPGTSTEPSEGSAPGSPAGSPTSTEEGTSTEPSEGSAPGTSTEPSEPKKKRKVMDKKYSIGLAIGTNSVGWAVITDEYKVPSKKFKVLGNTDRHSIKKNLIGALLFDSGETAEATRLKRTARRRYTRRKNRICYLQEIFSNEMAKVDDSFFHRLEESFLVEEDKKHERHPIFGNIVDEVAYHEKYPTIYHLRKKLVDSTDKADLRLIYLALAHMIKFRGHFLIEGDLNPDNSDVDKLFIQLVQTYNQLFEENPINASGVDAKAILSARLSKSRRLENLIAQLPGEKKNGLFGNLIALSLGLTPNFKSNFDLAEDAKLQLSKDTYDDDLDNLLAQIGDQYADLFLAAKNLSDAILLSDILRVNTEITKAPLSASMIKRYDEHHQDLTLLKALVRQQLPEKYKEIFFDQSKNGYAGYIDGGASQEEFYKFIKPILEKMDGTEELLVKLNREDLLRKQRTFDNGSIPHQIHLGELHAILRRQEDFYPFLKDNREKIEKILTFRIPYYVGPLARGNSRFAWMTRKSEETITPWNFEEVVDKGASAQSFIERMTNFDKNLPNEKVLPKHSLLYEYFTVYNELTKVKYVTEGMRKPAFLSGEQKKAIVDLLFKTNRKVTVKQLKEDYFKKIECFDSVEISGVEDRFNASLGTYHDLLKIIKDKDFLDNEENEDILEDIVLTLTLFEDREMIEERLKTYAHLFDDKVMKQLKRRRYTGWGRLSRKLINGIRDKQSGKTILDFLKSDGFANRNFMQLIHDDSLTFKEDIQKAQVSGQGDSLHEHIANLAGSPAIKKGILQTVKVVDELVKVMGRHKPENIVIEMARENQTTQKGQKNSRERMKRIEEGIKELGSQILKEHPVENTQLQNEKLYLYYLQNGRDMYVDQELDINRLSDYDVDAIVPQSFLKDDSIDNKVLTRSDKNRGKSDNVPSEEVVKKMKNYWRQLLNAKLITQRKFDNLTKAERGGLSELDKAGFIKRQLVETRQITKHVAQILDSRMNTKYDENDKLIREVKVITLKSKLVSDFRKDFQFYKVREINNYHHAHDAYLNAVVGTALIKKYPKLESEFVYGDYKVYDVRKMIAKSEQEIGKATAKYFFYSNIMNFFKTEITLANGEIRKRPLIETNGETGEIVWDKGRDFATVRKVLSMPQVNIVKKTEVQTGGFSKESILPKRNSDKLIARKKDWDPKKYGGFDSPTVAYSVLVVAKVEKGKSKKLKSVKELLGITIMERSSFEKNPIDFLEAKGYKEVKKDLIIKLPKYSLFELENGRKRMLASAGELQKGNELALPSKYVNFLYLASHYEKLKGSPEDNEQKQLFVEQHKHYLDEIIEQISEFSKRVILADANLDKVLSAYNKHRDKPIREQAENIIHLFTLTNLGAPAAFKYFDTTIDRKRYTSTKEVLDATLIHQSITGLYETRIDLSQLGGDPKKKRKV

SEQ ID NO: 1154-1156 - skipped (3 entries)

SEQ ID NO: 1157 - protein, 182 aa, synthetic construct; identical to SEQ ID NO: 703
  REGION 1..182: note = Description of Artificial Sequence: Synthetic polypeptide
  MOD_RES 19..25: note = Any amino acid
  MOD_RES 47..53: note = Any amino acid
  MOD_RES 59..67: note = This region may encompass one of the following sequences: "TGSQKP" or "TGGGGSQKP"
  MOD_RES 79..85: note = Any amino acid
  MOD_RES 107..113: note = Any amino acid
  MOD_RES 119..127: note = This region may encompass one of the following sequences: "TGSQKP" or "TGGGGSQKP"
  MOD_RES 139..145: note = Any amino acid
  MOD_RES 167..173: note = Any amino acid

SEQ ID NO: 1158 - protein, 25 aa, synthetic construct
  REGION 1..25: note = Description of Artificial Sequence: Synthetic peptide
  MOD_RES 2..5: note = Any amino acid
  SITE 2..5: note = This region may encompass 2-4 residues
  MOD_RES 7..18: note = Any amino acid
  MOD_RES 20..24: note = Any amino acid
  SITE 20..24: note = This region may encompass 3-5 residues
CXXXXCXXXXXXXXXXXXHXXXXXH

SEQ ID NO: 1159 - protein, 5 aa, synthetic construct
  REGION 1..5: note = Description of Artificial Sequence: Synthetic peptide
GGGGS

SEQ ID NO: 1160 - protein, 5 aa, synthetic construct
  REGION 1..5: note = Description of Artificial Sequence: Synthetic peptide
EAAAK

SEQ ID NO: 1161 - protein, 4 aa, synthetic construct
  REGION 1..4: note = Description of Artificial Sequence: Synthetic peptide
SGGS

SEQ ID NO: 1162 - protein, 4 aa, unidentified
  REGION 1..4: note = Description of Unknown: hairy-related basic helix-loop-helix motif
WRPW

SEQ ID NO: 1163 - protein, 6 aa, synthetic construct
  REGION 1..6: note = Description of Artificial Sequence: Synthetic peptide
LMSTEN

SEQ ID NO: 1164 - protein, 21 aa, synthetic construct
  REGION 1..21: note = Description of Artificial Sequence: Synthetic peptide
  SITE 1..21: note = This sequence may encompass 1, 3 or 7 "Gly Gly Ser" repeating units
GGSGGSGGSGGSGGSGGSGGS
